(19) United States
(12) Patent Application Publication
(10) Pub. No.: US 2002/0039760 A1
(43) Pub. Date: Apr. 4, 2002

(54) Polynucleotides encoding novel secreted proteins

(76) Inventors: Gorden G. Wong, Brookline, MA (US); Hilary F. Clark, San Francisco, CA (US); Kim Fechtel, Arlington, MA (US); Michael J. Agostino, Andover, MA (US); Steven H. Howes, Cambridge, MA (US); Richard J. Resnick, Somerville, MA (US); Kamalakar Gulukota, Lawrenceville, NJ (US); James R. Graham, Arlington, MA (US)

Correspondence Address: LAHIVE & COCKFIELD, 28 STATE STREET, BOSTON, MA, 02109, US

(21) Appl. No.: 09/823,245

(22) Filed: Mar. 29, 2001

Related U.S. Application Data
(60) Provisional application No. 60/194,941, filed on Apr. 6, 2000.

(51) Int. Cl. C12P 21/02; C12N 5/06; C07H 21/04; C12N 9/00

(52) U.S. Cl. 435/69.1; 435/325; 435/320.1; 435/183; 536/23.2

(57) ABSTRACT

Isolated polynucleotides which have been derived from a variety of human tissue sources, and which encode novel secreted proteins, are provided. Also provided are methods for producing proteins using these polynucleotides, and the proteins so produced.

### RELATED APPLICATIONS

[0001] This application claims the benefit of prior-filed provisional patent application U.S. Ser. No. 60/194,941 entitled “Polynucleotides Encoding Novel Secreted Proteins”, filed Apr. 6, 2000. The content of the above-referenced application is incorporated in its entirety.

### FIELD OF THE INVENTION

[0002] The present invention provides novel polynucleotides and proteins encoded by such polynucleotides, along with therapeutic, diagnostic and research utilities for these polynucleotides and proteins.

### BACKGROUND OF THE INVENTION

[0003] Gargantuan efforts have been employed by various investigational projects to randomly sequence portions of naturally-occurring cDNAs. The rationale behind this approach to identification and sequencing genes is founded in two basic principles: (1) that transcribed cDNAs represent the product of the most important genes, namely those that are actually expressed in vivo, and (2) that efforts to sequence genes and other portions of the genome of target organisms which are not actually expressed wastes substantial effort on areas not likely to yield genetic information of therapeutic importance. Thus, the high-throughput sequencing efforts focus on only those portions of the genome which are expressed. The randomly produced cDNA sequences represent “expressed sequence tags” or “ESTs”, which identify and can be used as probes for the longer, full-length cDNA or genomic sequence from which they were transcribed.

[0004] Although this “shortcut” approach to genomic sequencing presents savings of effort compared to sequencing of the complete genome, it still produced a vast array of ESTs which may not be directly useful as protein therapeutics. To date, the majority of protein-related drug discovery has focused on the use of secreted proteins to produce a desired therapeutic effect. Since the EST approach theoretically identifies all expressed proteins, it produces an EST library which contains a mixture of secreted proteins (such as hormones, cytokines and receptors) and non-secreted proteins (such as, for example, metabolic enzymes and cellular structural proteins), without identifying which ESTs correspond to proteins falling into either category. As a result, these methods are not optimally tailored to the needs of investigators searching for secreted proteins because they must separate the secreted “wheat” from the non-secreted “chaff”, wasting effort and resources in the process.

[0005] Technology aimed at the discovery of protein factors (including e.g., cytokines, such as lymphokines, interferons, CSFs and interleukins) has matured rapidly over the past decade. The now routine hybridization cloning and expression cloning techniques clone novel polynucleotides “directly” in the sense that they rely on information directly related to the discovered protein (i.e., partial DNA/amino acid sequence of the protein in the case of hybridization cloning; activity of the protein in the case of expression cloning).

[0006] More recent “indirect” cloning techniques such as signal sequence cloning, which isolates DNA sequences based on the presence of a now well-recognized secretory leader sequence motif, as well as various PCR-based or low stringency hybridization cloning techniques, have advanced the state of the art by making available large numbers of DNA/amino acid sequences for proteins that are known to have biological activity by virtue of their secreted nature in the case of leader sequence cloning, or by virtue of the cell or tissue source in the case of PCR-based techniques. Co-assigned U.S. Pat. No. 5,536,637, which is incorporated herein by reference, provides methods for focusing genomic sequencing efforts on sequences encoding the secreted proteins which are of most interest for identification of protein therapeutics. The '637 patent discloses a “signal sequence trap” which selectively identifies partial sequences encoding secreted proteins, namely “secreted expressed sequence tags” or “sESTs”. The sequences of these sESTs can be used to design probes to isolate the full-length cDNA clones that encode secreted proteins.

[0007] It is to these secreted proteins and the full-length polynucleotides encoding them that the present invention is directed.

### SUMMARY OF THE INVENTION

[0008] The present invention provides for full-length cDNAs isolated from a variety of human RNA/cDNA sources which encode novel secreted proteins.

[0009] In preferred embodiments, the present invention provides an isolated polynucleotide comprising a nucleotide sequence selected from the group consisting of:

[0010] SEQ ID NO:1, SEQ ID NO:2, SEQ ID NO:3, SEQ ID NO:4, SEQ ID NO:5, SEQ ID NO:6, SEQ ID NO:7, SEQ ID NO:8, SEQ ID NO:9, SEQ ID NO:10, SEQ ID NO:11, SEQ ID NO:12, SEQ ID NO:13, SEQ ID NO:14, SEQ ID NO:15, SEQ ID NO:16, SEQ ID NO:17, SEQ ID NO:18, SEQ ID NO:19, SEQ ID NO:20, SEQ ID NO:21, SEQ ID NO:22, SEQ ID NO:23, SEQ ID NO:24, SEQ ID NO:25, SEQ ID NO:26, SEQ ID NO:27, SEQ ID NO:28, SEQ ID NO:29, SEQ ID NO:30, SEQ ID NO:31, SEQ ID NO:32, SEQ ID NO:33, SEQ ID NO:34, SEQ ID NO:35, SEQ ID NO:36, SEQ ID NO:37, SEQ ID NO:38, SEQ ID NO:39, SEQ ID NO:40, SEQ ID NO:41, SEQ ID NO:42, SEQ ID NO:43, SEQ ID NO:44, SEQ ID NO:45, SEQ ID NO:46, SEQ ID NO:47, SEQ ID NO:48, SEQ ID NO:49, SEQ ID NO:50, SEQ ID NO:51, SEQ ID NO:52, SEQ ID NO:53, SEQ ID NO:54, SEQ ID NO:55, SEQ ID NO:56, SEQ ID NO:57, SEQ ID NO:58, SEQ ID NO:59, SEQ ID NO:60, SEQ ID NO:61, SEQ ID NO:62, SEQ ID NO:63, SEQ ID NO:64, SEQ ID NO:65, SEQ ID NO:66, SEQ ID NO:67, SEQ ID NO:68, SEQ ID NO:69, SEQ ID NO:70, SEQ ID NO:71, SEQ ID NO:72, SEQ ID NO:73, SEQ ID NO:74, SEQ ID NO:75, SEQ ID NO:76, SEQ ID NO:77, SEQ ID NO:78, SEQ ID NO:79, SEQ ID NO:80, SEQ ID NO:81, SEQ ID NO:82, SEQ ID NO:83, SEQ ID NO:84, SEQ ID NO:85, SEQ ID NO:86, SEQ ID NO:87, SEQ ID NO:88, SEQ ID NO:89, SEQ ID NO:90, SEQ ID NO:91, SEQ ID NO:92, SEQ ID NO:93, SEQ ID NO:94, SEQ ID NO:95, SEQ ID NO:96, SEQ ID NO:97, SEQ ID NO:98, SEQ ID NO:99, SEQ ID NO:100, SEQ ID NO:101, SEQ ID NO:102, SEQ ID NO:103, SEQ ID NO:104, SEQ ID NO:105, SEQ ID NO:106, SEQ ID NO:107, SEQ ID NO:108, SEQ ID NO:109, SEQ ID NO:110, SEQ ID NO:111, SEQ ID NO:112, SEQ ID NO:113, SEQ ID NO:114, SEQ ID NO:115, SEQ ID NO:116, SEQ ID NO:117, SEQ ID NO:118, SEQ ID NO:119, SEQ ID NO:120, SEQ ID NO:121, SEQ ID NO:122, SEQ ID NO:123, SEQ ID NO:124, SEQ ID NO:125, SEQ ID NO:126, SEQ ID NO:127, SEQ ID NO:128, SEQ ID NO:129, SEQ ID NO:130, SEQ ID NO:131, SEQ ID NO:132, SEQ ID NO:133, SEQ ID NO:134, SEQ ID NO:135, SEQ ID NO:136, SEQ ID NO:137, SEQ ID NO:138, SEQ ID NO:139, SEQ ID NO:140, SEQ ID NO:141, SEQ ID NO:142, SEQ ID NO:143, SEQ ID NO:144, SEQ ID NO:145, SEQ ID NO:146, SEQ ID NO:147, SEQ ID NO:148, SEQ ID NO:149, SEQ ID NO:150, SEQ ID NO:151, SEQ ID NO:152, SEQ ID NO:153, SEQ ID NO:154, SEQ ID NO:155, SEQ ID NO:156, SEQ ID NO:157, SEQ ID NO:158, SEQ ID NO:159, SEQ ID NO:160, SEQ ID NO:161, SEQ ID NO:162, SEQ ID NO:163, SEQ ID NO:164, SEQ ID NO:165, SEQ ID NO:166, SEQ ID NO:167, SEQ ID NO:168, SEQ ID NO:169, SEQ ID NO:170, SEQ ID NO:171, SEQ ID NO:172, SEQ ID NO:173, SEQ ID NO:174, SEQ ID NO:175, SEQ ID NO:176, SEQ ID NO:177, SEQ ID NO:178, SEQ ID NO:179, SEQ ID NO:180, SEQ ID NO:181, SEQ ID NO:182, SEQ ID NO:183, SEQ ID NO:184, SEQ ID NO:185, SEQ ID NO:186, SEQ ID NO:187, SEQ ID NO:188, SEQ ID NO:189, SEQ ID NO:190, SEQ ID NO:191, SEQ ID NO:192, SEQ ID NO:193, SEQ ID NO:194, SEQ ID NO:195, SEQ ID NO:196, SEQ ID NO:197, SEQ ID NO:198, SEQ ID NO:199, SEQ ID NO:200, SEQ ID NO:201, SEQ ID NO:202, SEQ ID NO:203, SEQ ID NO:204, SEQ ID NO:205, SEQ ID NO:206, SEQ ID NO:207, SEQ ID NO:208, SEQ ID NO:209, SEQ ID NO:210, SEQ ID NO:211, SEQ ID NO:212, SEQ ID NO:213, SEQ ID NO:214, SEQ ID NO:215, SEQ ID NO:216, SEQ ID NO:217, SEQ ID NO:218, SEQ ID NO:219, SEQ ID NO:220, SEQ ID NO:221, SEQ ID NO:222, SEQ ID NO:223, SEQ ID NO:224, SEQ ID NO:225, SEQ ID NO:226, SEQ ID NO:227, SEQ ID NO:228, SEQ ID NO:229, SEQ ID NO:230, SEQ ID NO:231, SEQ ID NO:232, SEQ ID NO:233, SEQ ID NO:234, SEQ ID NO:235, SEQ ID NO:236, SEQ ID NO:237, SEQ ID NO:238, SEQ ID NO:239, SEQ ID NO:240, SEQ ID NO:241, SEQ ID NO:242, SEQ ID NO:243, SEQ ID NO:244, SEQ ID NO:245, SEQ ID NO:246, SEQ ID NO:247, SEQ ID NO:248, SEQ ID NO:249, SEQ ID NO:250, SEQ ID NO:251, SEQ ID NO:252, SEQ ID NO:253, SEQ ID NO:254, SEQ ID NO:255, SEQ ID NO:256, SEQ ID NO:257, SEQ ID NO:258, SEQ ID NO:259, SEQ ID NO:260, SEQ ID NO:261, SEQ ID NO:262, SEQ ID NO:263, SEQ ID NO:264, SEQ ID NO:265, SEQ ID NO:266, SEQ ID NO:267, SEQ ID NO:268, SEQ ID NO:269, SEQ ID NO:270, SEQ ID NO:271, SEQ ID NO:272, SEQ ID NO:273, SEQ ID NO:274, SEQ ID NO:275, SEQ ID NO:276, SEQ ID NO:277, SEQ ID NO:278, SEQ ID NO:279, SEQ ID NO:280, SEQ ID NO:281, SEQ ID NO:282, SEQ ID NO:283, SEQ ID NO:284, SEQ ID NO:285, SEQ ID NO:286, SEQ ID NO:287, SEQ ID NO:288, SEQ ID NO:289, SEQ ID NO:290, SEQ ID NO:291, SEQ ID NO:292, SEQ ID NO:293, SEQ ID NO:294, SEQ ID NO:295, SEQ ID NO:296, SEQ ID NO:297, SEQ ID NO:298, SEQ ID NO:299, SEQ ID NO:300, SEQ ID NO:301, SEQ ID NO:302, SEQ ID NO:303, SEQ ID NO:304, SEQ ID NO:305, SEQ ID NO:306, SEQ ID NO:307, SEQ ID NO:308, SEQ ID NO:309, SEQ ID NO:310, SEQ ID NO:311, SEQ ID NO:312, SEQ ID NO:313, SEQ ID NO:314, SEQ ID NO:315, SEQ ID NO:316, SEQ ID NO:317, SEQ ID NO:318, SEQ ID NO:319, SEQ ID NO:320, SEQ ID NO:321, SEQ ID NO:322, SEQ ID NO:323, SEQ ID NO:324, SEQ ID NO:325, SEQ ID NO:326, SEQ ID NO:327, SEQ ID NO:328, SEQ ID NO:329, SEQ ID NO:330, SEQ ID NO:331, SEQ ID NO:332, SEQ ID NO:333, SEQ ID NO:334, SEQ ID NO:335, SEQ ID NO:336, SEQ ID NO:337, SEQ ID NO:338, SEQ ID NO:339, SEQ ID NO:340, SEQ ID NO:341, SEQ ID NO:342, SEQ ID NO:343, SEQ ID NO:344, SEQ ID NO:345, SEQ ID NO:346, SEQ ID NO:347, SEQ ID NO:348, SEQ ID NO:349, SEQ ID NO:350, SEQ ID NO:351, SEQ ID NO:352, SEQ ID NO:353, SEQ ID NO:354, SEQ ID NO:355, SEQ ID NO:356, SEQ ID NO:357, SEQ ID NO:358, SEQ ID NO:359, SEQ ID NO:360, SEQ ID NO:361, SEQ ID NO:362, SEQ ID NO:363, SEQ ID NO:364, SEQ ID NO:365, SEQ ID NO:366, SEQ ID NO:367, SEQ ID NO:368, SEQ ID NO:369, SEQ ID NO:370, SEQ ID NO:371, SEQ ID NO:372, SEQ ID NO:373, SEQ ID NO:374, SEQ ID NO:375, SEQ ID NO:376, SEQ ID NO:377, SEQ ID NO:378, SEQ ID NO:379, SEQ ID NO:380, SEQ ID NO:381, SEQ ID NO:382, SEQ ID NO:383, SEQ ID NO:384, SEQ ID NO:385, SEQ ID NO:386, SEQ ID NO:387, SEQ ID NO:388, SEQ ID NO:389, SEQ ID NO:390, SEQ ID NO:398, SEQ ID NO:392, SEQ ID NO:393, SEQ ID NO:394, SEQ ID NO:395, SEQ ID NO:396, SEQ ID NO:397, SEQ ID NO:398, SEQ ID NO:399, SEQ ID NO:400, SEQ ID NO:401, SEQ ID NO:402, SEQ ID NO:403, SEQ ID NO:404, SEQ ID NO:405, SEQ ID NO:406, SEQ ID NO:407, SEQ ID NO:408, SEQ ID NO:409, SEQ ID NO:410, SEQ ID NO:411, SEQ ID NO:412, SEQ ID NO:413, SEQ ID NO:414, SEQ ID NO:415, SEQ ID NO:416, SEQ ID NO:417, SEQ ID NO:418, SEQ ID NO:419, SEQ ID NO:420, SEQ ID NO:421, SEQ ID NO:422, SEQ ID NO:423, SEQ ID NO:424, SEQ ID NO:425, SEQ ID NO:426, SEQ ID NO:427, SEQ ID NO:428, SEQ ID NO:429, SEQ ID NO:430, SEQ ID NO:431, SEQ ID NO:432, SEQ ID NO:433, SEQ ID NO:434, SEQ ID NO:435, SEQ ID NO:436, SEQ ID NO:437, SEQ ID NO:438, SEQ ID NO:439, SEQ ID NO:440, SEQ ID NO:441, SEQ ID NO:442, SEQ ID NO:443, SEQ ID NO:444, SEQ ID NO:445, SEQ ID NO:446, SEQ ID NO:447, SEQ ID NO:448, SEQ ID NO:449, SEQ ID NO:450, SEQ ID NO:451, SEQ ID NO:452, SEQ ID NO:453, SEQ ID NO:454, SEQ ID NO:455, SEQ ID NO:456, SEQ ID NO:457, SEQ ID NO:458, SEQ ID NO:459, SEQ ID NO:460, SEQ ID NO:461, SEQ ID NO:462, SEQ ID NO:463, SEQ ID NO:464, SEQ ID NO:465, SEQ ID NO:466, SEQ ID NO:467, SEQ ID NO:468, SEQ ID NO:469, SEQ ID NO:470, SEQ ID NO:471, SEQ ID NO:472, SEQ ID NO:473, SEQ ID NO:474, SEQ ID NO:475, SEQ ID NO:476, SEQ ID NO:477, SEQ ID NO:478, SEQ ID NO:479, SEQ ID NO:480, SEQ ID NO:481, SEQ ID NO:482, SEQ ID NO:483, SEQ ID NO:484, SEQ ID NO:485, SEQ ID NO:486, SEQ ID NO:487, SEQ ID NO:488, SEQ ID NO:489, SEQ ID NO:490, SEQ ID NO:491, SEQ ID NO:492, SEQ ID NO:493, SEQ ID NO:494, SEQ ID NO:495, SEQ ID NO:496, SEQ ID NO:497, SEQ ID NO:498, SEQ ID NO:499, SEQ ID NO:500, SEQ ID NO:501, SEQ ID NO:502, SEQ ID NO:503, SEQ ID NO:504, SEQ ID NO:505, SEQ ID NO:506, SEQ ID NO:507, SEQ ID NO:508, SEQ ID NO:509, SEQ ID NO:510, SEQ ID NO:511, SEQ ID NO:512, SEQ ID NO:513, SEQ ID NO:514, SEQ ID NO:515, SEQ ID NO:516, SEQ ID NO:517, SEQ ID NO:518, SEQ ID NO:519, SEQ ID NO:520, SEQ ID NO:521, SEQ ID NO:522, SEQ ID NO:523, SEQ ID NO:524, SEQ ID NO:525, SEQ ID NO:526, SEQ ID NO:527, SEQ ID NO:528, SEQ ID NO:529, SEQ ID NO:530, SEQ ID NO:531, SEQ ID NO:532, SEQ ID NO:533, SEQ ID NO:534, SEQ ID NO:535, SEQ ID NO:536, SEQ ID NO:537, SEQ ID NO:538, SEQ ID NO:539, SEQ ID NO:540, SEQ ID NO:541, SEQ ID NO:542, SEQ ID NO:543, SEQ ID NO:544, SEQ ID NO:545, SEQ ID NO:546, SEQ ID NO:547, SEQ ID NO:548, SEQ ID NO:549, SEQ ID NO:550, SEQ ID NO:551, SEQ ID NO:542, SEQ ID NO:553, SEQ ID NO:554, SEQ ID NO:555, SEQ ID NO:556, SEQ ID NO:557, SEQ ID NO:558, SEQ ID NO:559, SEQ ID NO:560, SEQ ID NO:561, SEQ ID NO:562, SEQ ID NO:563, SEQ ID NO:564, SEQ ID NO:565, SEQ ID NO:566, SEQ ID NO:567, SEQ ID NO:568, SEQ ID NO:569, SEQ ID NO:570, SEQ ID NO:571, SEQ ID NO:572, SEQ ID NO:573, SEQ ID NO:574, SEQ ID NO:575, SEQ ID NO:576, SEQ ID NO:577, SEQ ID NO:578, SEQ ID NO:579, SEQ ID NO:580, SEQ ID NO:581, SEQ ID NO:582, SEQ ID NO:583, SEQ ID NO:584, SEQ ID NO:585, SEQ ID NO:586, SEQ ID NO:587, SEQ ID NO:588, SEQ ID NO:589, SEQ ID NO:590, SEQ ID NO:591, SEQ ID NO:592, SEQ ID NO:593, SEQ ID NO:594, SEQ ID NO:595, SEQ ID NO:596, SEQ ID NO:597, SEQ ID NO:598, SEQ ID NO:599, SEQ ID NO:600, SEQ ID NO:601, SEQ ID NO:602, SEQ ID NO:603, SEQ ID NO:604, SEQ ID NO:605, SEQ ID NO:606, SEQ ID NO:567, SEQ ID NO:608, SEQ ID NO:609, SEQ ID NO:610, SEQ ID NO:611, SEQ ID NO:612, SEQ ID NO:613, SEQ ID NO:614, SEQ ID NO:615, SEQ ID NO:616, SEQ ID NO:617, SEQ ID NO:618, SEQ ID NO:619, SEQ ID NO:620, SEQ ID NO:621, SEQ ID NO:622, SEQ ID NO:623, SEQ ID NO:624, SEQ ID NO:625; or a complement of said sequence.

[0011] In other embodiments, the present invention provides an isolated polynucleotide consisting of a nucleotide sequence selected from the group consisting of:

[0012] SEQ ID NO:1, SEQ ID NO:2, SEQ ID NO:3, SEQ ID NO:4, SEQ ID NO:5, SEQ ID NO:6, SEQ ID NO:7, SEQ ID NO:8, SEQ ID NO:9, SEQ ID NO:10, SEQ ID NO:11, SEQ ID NO:12, SEQ ID NO:13, SEQ ID NO:14, SEQ ID NO:15, SEQ ID NO:16, SEQ ID NO:17, SEQ ID NO:18, SEQ ID NO:19, SEQ ID NO:20, SEQ ID NO:21, SEQ ID NO:22, SEQ ID NO:23, SEQ ID NO:24, SEQ ID NO:25, SEQ ID NO:26, SEQ ID NO:27, SEQ ID NO:28, SEQ ID NO:29, SEQ ID NO:30, SEQ ID NO:31, SEQ ID NO:32, SEQ ID NO:33, SEQ ID NO:34, SEQ ID NO:35, SEQ ID NO:36, SEQ ID NO:37, SEQ ID NO:38, SEQ ID NO:39, SEQ ID NO:40, SEQ ID NO:41, SEQ ID NO:42, SEQ ID NO:43, SEQ ID NO:44, SEQ ID NO:45, SEQ ID NO:46, SEQ ID NO:47, SEQ ID NO:48, SEQ ID NO:49, SEQ ID NO:50, SEQ ID NO:51, SEQ ID NO:52, SEQ ID NO:53, SEQ ID NO:54, SEQ ID NO:55, SEQ ID NO:56, SEQ ID NO:57, SEQ ID NO:58, SEQ ID NO:59, SEQ ID NO:60, SEQ ID NO:61, SEQ ID NO:62, SEQ ID NO:63, SEQ ID NO:64, SEQ ID NO:65, SEQ ID NO:66, SEQ ID NO:67, SEQ ID NO:68, SEQ ID NO:69, SEQ ID NO:70, SEQ ID NO:71, SEQ ID NO:72, SEQ ID NO:73, SEQ ID NO:74, SEQ ID NO:75, SEQ ID NO:76, SEQ ID NO:77, SEQ ID NO:78, SEQ ID NO:79, SEQ ID NO:80, SEQ ID NO:81, SEQ ID NO:82, SEQ ID NO:83, SEQ ID NO:84, SEQ ID NO:85, SEQ ID NO:86, SEQ ID NO:87, SEQ ID NO:88, SEQ ID NO:89, SEQ ID NO:90, SEQ ID NO:91, SEQ ID NO:92, SEQ ID NO:93, SEQ ID NO:94, SEQ ID NO:95, SEQ ID NO:96, SEQ ID NO:97, SEQ ID NO:98, SEQ ID NO:99, SEQ ID NO:100, SEQ ID NO:101, SEQ ID NO:102, SEQ ID NO:103, SEQ ID NO:104, SEQ ID NO:105, SEQ ID NO:106, SEQ ID NO:107, SEQ ID NO:108, SEQ ID NO:109, SEQ ID NO:110, SEQ ID NO:111, SEQ ID NO:112, SEQ ID NO:113, SEQ ID NO:114, SEQ ID NO:115, SEQ ID NO:116, SEQ ID NO:117, SEQ ID NO:118, SEQ ID NO:119, SEQ ID NO:120, SEQ ID NO:121, SEQ ID NO:122, SEQ ID NO:123, SEQ ID NO:124, SEQ ID NO:125, SEQ ID NO:126, SEQ ID NO:127, SEQ ID NO:128, SEQ ID NO:129, SEQ ID NO:130, SEQ ID NO:131, SEQ ID NO:132, SEQ ID NO:133, SEQ ID NO:134, SEQ ID NO:135, SEQ ID NO:136, SEQ ID NO:137, SEQ ID NO:138, SEQ ID NO:139, SEQ ID NO:140, SEQ ID NO:141, SEQ ID NO:142, SEQ ID NO:143, SEQ ID NO:144, SEQ ID NO:145, SEQ ID NO:146, SEQ ID NO:147, SEQ ID NO:148, SEQ ID NO:149, SEQ ID NO:150, SEQ ID NO:151, SEQ ID NO:152, SEQ ID NO:153, SEQ ID NO:154, SEQ ID NO:155, SEQ ID NO:156, SEQ ID NO:157, SEQ ID NO:158, SEQ ID NO:159, SEQ ID NO:160, SEQ ID NO:161, SEQ ID NO:162, SEQ ID NO:163, SEQ ID NO:164, SEQ ID NO:165, SEQ ID NO:166, SEQ ID NO:167, SEQ ID NO:168, SEQ ID NO:169, SEQ ID NO:170, SEQ ID NO:171, SEQ ID NO:172, SEQ ID NO:173, SEQ ID NO:174, SEQ ID NO:175, SEQ ID NO:176, SEQ ID NO:177, SEQ ID NO:178, SEQ ID NO:179, SEQ ID NO:180, SEQ ID NO:181, SEQ ID NO:182, SEQ ID NO:183, SEQ ID NO:184, SEQ ID NO:185, SEQ ID NO:186, SEQ ID NO:187, SEQ ID NO:188, SEQ ID NO:189, SEQ ID NO:190, SEQ ID NO:191, SEQ ID NO:192, SEQ ID NO:193, SEQ ID NO:194, SEQ ID NO:195, SEQ ID NO:196, SEQ ID NO:197, SEQ ID NO:198, SEQ ID NO:199, SEQ ID NO:200, SEQ ID NO:201, SEQ ID NO:202, SEQ ID NO:203, SEQ ID NO:204, SEQ ID NO:205, SEQ ID NO:206, SEQ ID NO:207, SEQ ID NO:208, SEQ ID NO:209, SEQ ID NO:210, SEQ ID NO:211, SEQ ID NO:212, SEQ ID NO:213, SEQ ID NO:214, SEQ ID NO:215, SEQ ID NO:216, SEQ ID NO:217, SEQ ID NO:218, SEQ ID NO:219, SEQ ID NO:220, SEQ ID NO:221, SEQ ID NO:222, SEQ ID NO:223, SEQ ID NO:224, SEQ ID NO:225, SEQ ID NO:226, SEQ ID NO:227, SEQ ID NO:228, SEQ ID NO:229, SEQ ID NO:230, SEQ ID NO:231, SEQ ID NO:232, SEQ ID NO:233, SEQ ID NO:234, SEQ ID NO:235, SEQ ID NO:236, SEQ ID NO:237, SEQ ID NO:238, SEQ ID NO:239, SEQ ID NO:240, SEQ ID NO:241, SEQ ID NO:242, SEQ ID NO:243, SEQ ID NO:244, SEQ ID NO:245, SEQ ID NO:246, SEQ ID NO:247, SEQ ID NO:248, SEQ ID NO:249, SEQ ID NO:250, SEQ ID NO:251, SEQ ID NO:252, SEQ ID NO:253, SEQ ID NO:254, SEQ ID NO:255, SEQ ID NO:256, SEQ ID NO:257, SEQ ID NO:258, SEQ ID NO:259, SEQ ID NO:260, SEQ ID NO:261, SEQ ID NO:262, SEQ ID NO:263, SEQ ID NO:264, SEQ ID NO:265, SEQ ID NO:266, SEQ ID NO:267, SEQ ID NO:268, SEQ ID NO:269, SEQ ID NO:270, SEQ ID NO:271, SEQ ID NO:272, SEQ ID NO:273, SEQ ID NO:274, SEQ ID NO:275, SEQ ID NO:276, SEQ ID NO:277, SEQ ID NO:278, SEQ ID NO:279, SEQ ID NO:280, SEQ ID NO:281, SEQ ID NO:282, SEQ ID NO:283, SEQ ID NO:284, SEQ ID NO:285, SEQ ID NO:286, SEQ ID NO:287, SEQ ID NO:288, SEQ ID NO:289, SEQ ID NO:290, SEQ ID NO:291, SEQ ID NO:292, SEQ ID NO:293, SEQ ID NO:294, SEQ ID NO:295, SEQ ID NO:296, SEQ ID NO:297, SEQ ID NO:298, SEQ ID NO:299, SEQ ID NO:300, SEQ ID NO:301, SEQ ID NO:302, SEQ ID NO:303, SEQ ID NO:304, SEQ ID NO:305, SEQ ID NO:306, SEQ ID NO:307, SEQ ID NO:308, SEQ ID NO:309, SEQ ID NO:310, SEQ ID NO:311, SEQ ID NO:312, SEQ ID NO:313, SEQ ID NO:314, SEQ ID NO:315, SEQ ID NO:316, SEQ ID NO:317, SEQ ID NO:318, SEQ ID NO:319, SEQ ID NO:320, SEQ ID NO:321, SEQ ID NO:322, SEQ ID NO:323, SEQ ID NO:324, SEQ ID NO:325, SEQ ID NO:326, SEQ ID NO:327, SEQ ID NO:328, SEQ ID NO:329, SEQ ID NO:330, SEQ ID NO:331, SEQ ID NO:332, SEQ ID NO:333, SEQ ID NO:334, SEQ ID NO:335, SEQ ID NO:336, SEQ ID NO:337, SEQ ID NO:338, SEQ ID NO:339, SEQ ID NO:340, SEQ ID NO:341, SEQ ID NO:342, SEQ ID NO:343, SEQ ID NO:344, SEQ ID NO:345, SEQ ID NO:346, SEQ ID NO:347, SEQ ID NO:348, SEQ ID NO:349, SEQ ID NO:350, SEQ ID NO:351, SEQ ID NO:352, SEQ ID NO:353, SEQ ID NO:354, SEQ ID NO:355, SEQ ID NO:356, SEQ ID NO:357, SEQ ID NO:358, SEQ ID NO:359, SEQ ID NO:360, SEQ ID NO:361, SEQ ID NO:362, SEQ ID NO:363, SEQ ID NO:364, SEQ ID NO:365, SEQ ID NO:366, SEQ ID NO:367, SEQ ID NO:368, SEQ ID NO:369, SEQ ID NO:370, SEQ ID NO:371, SEQ ID NO:372, SEQ ID NO:373, SEQ ID NO:374, SEQ ID NO:375, SEQ ID NO:376, SEQ ID NO:377, SEQ ID NO:378, SEQ ID NO:379, SEQ ID NO:380, SEQ ID NO:381, SEQ ID NO:382, SEQ ID NO:383, SEQ ID NO:384, SEQ ID NO:385, SEQ ID NO:386, SEQ ID NO:387, SEQ ID NO:388, SEQ ID NO:389, SEQ ID NO:390, SEQ ID NO:391, SEQ ID NO:392, SEQ ID NO:393, SEQ ID NO:394, SEQ ID NO:395, SEQ ID NO:396, SEQ ID NO:397, SEQ ID NO:398, SEQ ID NO:399, SEQ ID NO:400, SEQ ID NO:401, SEQ ID NO:402, SEQ ID NO:403, SEQ ID NO:404, SEQ ID NO:405, SEQ ID NO:406, SEQ ID NO:407, SEQ ID NO:408, SEQ ID NO:409, SEQ ID NO:410, SEQ ID NO:411, SEQ ID NO:412, SEQ ID NO:413, SEQ ID NO:414, SEQ ID NO:415, SEQ ID NO:416, SEQ ID NO:417, SEQ ID NO:418, SEQ ID NO:419, SEQ ID NO:420, SEQ ID NO:421, SEQ ID NO:422, SEQ ID NO:423, SEQ ID NO:424, SEQ ID NO:425, SEQ ID NO:426, SEQ ID NO:427, SEQ ID NO:428, SEQ ID NO:429, SEQ ID NO:430, SEQ ID NO:431, SEQ ID NO:432, SEQ ID NO:433, SEQ ID NO:434, SEQ ID NO:435, SEQ ID NO:436, SEQ ID NO:437, SEQ ID NO:438, SEQ ID NO:439, SEQ ID NO:440, SEQ ID NO:441, SEQ ID NO:442, SEQ ID NO:443, SEQ ID NO:444, SEQ ID NO:445, SEQ ID NO:446, SEQ ID NO:447, SEQ ID NO:448, SEQ ID NO:449, SEQ ID NO:450, SEQ ID NO:451, SEQ ID NO:452, SEQ ID NO:453, SEQ ID NO:454, SEQ ID NO:455, SEQ ID NO:456, SEQ ID NO:457, SEQ ID NO:458, SEQ ID NO:459, SEQ ID NO:460, SEQ ID NO:461, SEQ ID NO:462, SEQ ID NO:463, SEQ ID NO:464, SEQ ID NO:465, SEQ ID NO:466, SEQ ID NO:467, SEQ ID NO:468, SEQ ID NO:469, SEQ ID NO:470, SEQ ID NO:471, SEQ ID NO:472, SEQ ID NO:473, SEQ ID NO:474, SEQ ID NO:475, SEQ ID NO:476, SEQ ID NO:477, SEQ ID NO:478, SEQ ID NO:479, SEQ ID NO:480, SEQ ID NO:481, SEQ ID NO:482, SEQ ID NO:483, SEQ ID NO:484, SEQ ID NO:485, SEQ ID NO:486, SEQ ID NO:487, SEQ ID NO:488, SEQ ID NO:489, SEQ ID NO:490, SEQ ID NO:491, SEQ ID NO:492, SEQ ID NO:493, SEQ ID NO:494, SEQ ID NO:495, SEQ ID NO:496, SEQ ID NO:497, SEQ ID NO:498, SEQ ID NO:499, SEQ ID NO:500, SEQ ID NO:501, SEQ ID NO:502, SEQ ID NO:503, SEQ ID NO:504, SEQ ID NO:545, SEQ ID NO:506, SEQ ID NO:507, SEQ ID NO:508, SEQ ID NO:509, SEQ ID NO:510, SEQ ID NO:511, SEQ ID NO:512, SEQ ID NO:513, SEQ ID NO:514, SEQ ID NO:515, SEQ ID NO:516, SEQ ID NO:517, SEQ ID NO:518, SEQ ID NO:519, SEQ ID NO:520, SEQ ID NO:521, SEQ ID NO:522, SEQ ID NO:523, SEQ ID NO:524, SEQ ID NO:525, SEQ ID NO:526, SEQ ID NO:527, SEQ ID NO:528, SEQ ID NO:529, SEQ ID NO:530, SEQ ID NO:531, SEQ ID NO:532, SEQ ID NO:533, SEQ ID NO:534, SEQ ID NO:535, SEQ ID NO:536, SEQ ID NO:537, SEQ ID NO:538, SEQ ID NO:539, SEQ ID NO:540, SEQ ID NO:541, SEQ ID NO:542, SEQ ID NO:543, SEQ ID NO:544, SEQ ID NO:545, SEQ ID NO:546, SEQ ID NO:547, SEQ ID NO:548, SEQ ID NO:549, SEQ ID NO:550, SEQ ID NO:551, SEQ ID NO:552, SEQ ID NO:553, SEQ ID NO:554, SEQ ID NO:555, SEQ ID NO:556, SEQ ID NO:557, SEQ ID NO:558, SEQ ID NO:559, SEQ ID NO:560, SEQ ID NO:561, SEQ ID NO:562, SEQ ID NO:563, SEQ ID NO:564, SEQ ID NO:565, SEQ ID NO:566, SEQ ID NO:567, SEQ ID NO:568, SEQ ID NO:569, SEQ ID NO:570, SEQ ID NO:571, SEQ ID NO:572, SEQ ID NO:573, SEQ ID NO:574, SEQ ID NO:575, SEQ ID NO:576, SEQ ID NO:577, SEQ ID NO:578, SEQ ID NO:579, SEQ ID NO:580, SEQ ID NO:581, SEQ ID NO:582, SEQ ID NO:583, SEQ ID NO:584, SEQ ID NO:585, SEQ ID NO:586, SEQ ID NO:587, SEQ ID NO:588, SEQ ID NO:589, SEQ ID NO:590, SEQ ID NO:591, SEQ ID NO:592, SEQ ID NO:593, SEQ ID NO:594, SEQ ID NO:595, SEQ ID NO:596, SEQ ID NO:597, SEQ ID NO:598, SEQ ID NO:599, SEQ ID NO:600, SEQ ID NO:601, SEQ ID NO:602, SEQ ID NO:603, SEQ ID NO:604, SEQ ID NO:605, SEQ ID NO:606, SEQ ID NO:607, SEQ ID NO:608, SEQ ID NO:609, SEQ ID NO:610, SEQ ID NO:611, SEQ ID NO:612, SEQ ID NO:613, SEQ ID NO:614, SEQ ID NO:615, SEQ ID NO:616, SEQ ID NO:617, SEQ ID NO:618, SEQ ID NO:619, SEQ ID NO:620, SEQ ID NO:621, SEQ ID NO:622, SEQ ID NO:623, SEQ ID NO:624, SEQ ID NO:625; or a complement of said sequence.

[0013] In further embodiments, the present invention provides an isolated polynucleotide consisting essentially of a nucleotide sequence selected from the group consisting of:

[0014] SEQ ID NO:1, SEQ ID NO:2, SEQ ID NO:3, SEQ ID NO:4, SEQ ID NO:5, SEQ ID NO:6, SEQ ID NO:7, SEQ ID NO:8, SEQ ID NO:9, SEQ ID NO:10, SEQ ID NO:11, SEQ ID NO:12, SEQ ID NO:13, SEQ ID NO:14, SEQ ID NO:15, SEQ ID NO:16, SEQ ID NO:17, SEQ ID NO:18, SEQ ID NO:19, SEQ ID NO:20, SEQ ID NO:21, SEQ ID NO:22, SEQ ID NO:23, SEQ ID NO:24, SEQ ID NO:25, SEQ ID NO:26, SEQ ID NO:27, SEQ ID NO:28, SEQ ID NO:29, SEQ ID NO:30, SEQ ID NO:31, SEQ ID NO:32, SEQ ID NO:33, SEQ ID NO:34, SEQ ID NO:35, SEQ ID NO:36, SEQ ID NO:37, SEQ ID NO:38, SEQ ID NO:39, SEQ ID NO:40, SEQ ID NO:41, SEQ ID NO:42, SEQ ID NO:43, SEQ ID NO:44, SEQ ID NO:45, SEQ ID NO:46, SEQ ID NO:47, SEQ ID NO:48, SEQ ID NO:49, SEQ ID NO:50, SEQ ID NO:51, SEQ ID NO:52, SEQ ID NO:53, SEQ ID NO:54, SEQ ID NO:55, SEQ ID NO:56, SEQ ID NO:57, SEQ ID NO:58, SEQ ID NO:59, SEQ ID NO:60, SEQ ID NO:61, SEQ ID NO:62, SEQ ID NO:63, SEQ ID NO:64, SEQ ID NO:65, SEQ ID NO:66, SEQ ID NO:67, SEQ ID NO:68, SEQ ID NO:69, SEQ ID NO:70, SEQ ID NO:71, SEQ ID NO:72, SEQ ID NO:73, SEQ ID NO:74, SEQ ID NO:75, SEQ ID NO:76, SEQ ID NO:77, SEQ ID NO:78, SEQ ID NO:79, SEQ ID NO:80, SEQ ID NO:81, SEQ ID NO:82, SEQ ID NO:83, SEQ ID NO:84, SEQ ID NO:85, SEQ ID NO:86, SEQ ID NO:87, SEQ ID NO:88, SEQ ID NO:89, SEQ ID NO:90, SEQ ID NO:91, SEQ ID NO:92, SEQ ID NO:93, SEQ ID NO:94, SEQ ID NO:95, SEQ ID NO:96, SEQ ID NO:97, SEQ ID NO:98, SEQ ID NO:99, SEQ ID NO:100, SEQ ID NO:101, SEQ ID NO:102, SEQ ID NO:103, SEQ ID NO:104, SEQ ID NO:105, SEQ ID NO:106, SEQ ID

[0015] NO:107, SEQ ID NO:108, SEQ ID NO:109, SEQ ID NO:110, SEQ ID NO:111, SEQ ID NO:112, SEQ ID NO:113, SEQ ID NO:114, SEQ ID NO:115, SEQ ID NO:116, SEQ ID NO:117, SEQ ID NO:118, SEQ ID NO:119, SEQ ID NO:120, SEQ ID NO:121, SEQ ID NO:122, SEQ ID NO:123, SEQ ID NO:124, SEQ ID NO:125, SEQ ID NO:126, SEQ ID NO:127, SEQ ID NO:128, SEQ ID NO:129, SEQ ID NO:130, SEQ ID NO:131, SEQ ID NO:132, SEQ ID NO:133, SEQ ID NO:134, SEQ ID NO:135, SEQ ID NO:136, SEQ ID NO:137, SEQ ID NO:138, SEQ ID NO:139, SEQ ID NO:140, SEQ ID NO:141, SEQ ID NO:142, SEQ ID NO:143, SEQ ID NO:144, SEQ ID NO:145, SEQ ID NO:146, SEQ ID NO:147, SEQ ID NO:148, SEQ ID NO:149, SEQ ID NO:150, SEQ ID NO:151, SEQ ID NO:152, SEQ ID NO:153, SEQ ID NO:154, SEQ ID NO:155, SEQ ID NO:156, SEQ ID NO:157, SEQ ID NO:158, SEQ ID NO:159, SEQ ID NO:160, SEQ ID NO:161, SEQ ID NO:162, SEQ ID NO:163, SEQ ID NO:164, SEQ ID NO:165, SEQ ID NO:166, SEQ ID NO:167, SEQ ID NO:168, SEQ ID NO:169, SEQ ID NO:170, SEQ ID NO:171, SEQ ID NO:172, SEQ ID NO:173, SEQ ID NO:174, SEQ ID NO:175, SEQ ID NO:176, SEQ ID NO:177, SEQ ID NO:178, SEQ ID NO:179, SEQ ID NO:180, SEQ ID NO:181, SEQ ID NO:182, SEQ ID NO:183, SEQ ID NO:184, SEQ ID NO:185, SEQ ID NO:186, SEQ ID NO:187, SEQ ID NO:188, SEQ ID NO:189, SEQ ID NO:190, SEQ ID NO:191, SEQ ID NO:192, SEQ ID NO:193, SEQ ID NO:194, SEQ ID NO:195, SEQ ID NO:196, SEQ ID NO:197, SEQ ID NO:198, SEQ ID NO:199, SEQ ID NO:200, SEQ ID NO:201, SEQ ID NO:202, SEQ ID NO:203, SEQ ID NO:204, SEQ ID NO:205, SEQ ID NO:206, SEQ ID NO:207, SEQ ID NO:208, SEQ ID NO:209, SEQ ID NO:210, SEQ ID NO:211, SEQ ID NO:212, SEQ ID NO:213, SEQ ID NO:214, SEQ ID NO:215, SEQ ID NO:216, SEQ ID NO:217, SEQ ID NO:218, SEQ ID NO:219, SEQ ID NO:220, SEQ ID NO:221, SEQ ID NO:222, SEQ ID NO:223, SEQ ID NO:224, SEQ ID NO:225, SEQ ID NO:226, SEQ ID NO:227, SEQ ID NO:228, SEQ ID NO:229, SEQ ID NO:230, SEQ ID NO:231, SEQ ID NO:232, SEQ ID NO:233, SEQ ID NO:234, SEQ ID NO:235, SEQ ID NO:236, SEQ ID NO:237, SEQ ID NO:238, SEQ ID NO:239, SEQ ID NO:240, SEQ ID NO:241, SEQ ID NO:242, SEQ ID NO:243, SEQ ID NO:244, SEQ ID NO:245, SEQ ID NO:246, SEQ ID NO:247, SEQ ID NO:248, SEQ ID NO:249, SEQ ID NO:250, SEQ ID NO:251, SEQ ID NO:252, SEQ ID NO:253, SEQ ID NO:254, SEQ ID NO:255, SEQ ID NO:256, SEQ ID NO:257, SEQ ID NO:258, SEQ ID NO:259, SEQ ID NO:260, SEQ ID NO:261, SEQ ID NO:262, SEQ ID NO:263, SEQ ID NO:264, SEQ ID NO:265, SEQ ID NO:266, SEQ ID NO:267, SEQ ID NO:268, SEQ ID NO:269, SEQ ID NO:270, SEQ ID NO:271, SEQ ID NO:272, SEQ ID NO:273, SEQ ID NO:274, SEQ ID NO:275, SEQ ID NO:276, SEQ ID NO:277, SEQ ID NO:278, SEQ ID NO:279, SEQ ID NO:280, SEQ ID NO:281, SEQ ID NO:282, SEQ ID NO:283, SEQ ID NO:284, SEQ ID NO:285, SEQ ID NO:286, SEQ ID NO:287, SEQ ID NO:288, SEQ ID NO:289, SEQ ID NO:290, SEQ ID NO:291, SEQ ID NO:292, SEQ ID NO:293, SEQ ID NO:294, SEQ ID NO:295, SEQ ID NO:296, SEQ ID NO:297, SEQ ID NO:298, SEQ ID NO:299, SEQ ID NO:300, SEQ ID NO:321, SEQ ID NO:302, SEQ ID NO:303, SEQ ID NO:304, SEQ ID NO:305, SEQ ID NO:306, SEQ ID NO:307, SEQ ID NO:308, SEQ ID NO:309, SEQ ID NO:310, SEQ ID NO:311, SEQ ID NO:312, SEQ ID NO:313, SEQ ID NO:314, SEQ ID NO:315, SEQ ID NO:316, SEQ ID NO:317, SEQ ID NO:318, SEQ ID NO:319, SEQ ID NO:320, SEQ ID NO:321, SEQ ID NO:322, SEQ ID NO:323, SEQ ID NO:324, SEQ ID NO:325, SEQ ID NO:326, SEQ ID NO:327, SEQ ID NO:328, SEQ ID NO:329, SEQ ID NO:330, SEQ ID NO:331, SEQ ID NO:332, SEQ ID NO:333, SEQ ID NO:334, SEQ ID NO:335, SEQ ID NO:336, SEQ ID NO:337, SEQ ID NO:338, SEQ ID NO:339, SEQ ID NO:340, SEQ ID NO:341, SEQ ID NO:342, SEQ ID NO:343, SEQ ID NO:344, SEQ ID NO:345, SEQ ID NO:346, SEQ ID NO:347, SEQ ID NO:348, SEQ ID NO:349, SEQ ID NO:350, SEQ ID NO:351, SEQ ID NO:352, SEQ ID NO:353, SEQ ID NO:354, SEQ ID NO:355, SEQ ID NO:356, SEQ ID NO:357, SEQ ID NO:358, SEQ ID NO:359, SEQ ID NO:360, SEQ ID NO:361, SEQ ID NO:362, SEQ ID NO:363, SEQ ID NO:364, SEQ ID NO:365, SEQ ID NO:366, SEQ ID NO:367, SEQ ID NO:368, SEQ ID NO:369, SEQ ID NO:370, SEQ ID NO:371, SEQ ID NO:372, SEQ ID NO:373, SEQ ID NO:374, SEQ ID NO:375, SEQ ID NO:376, SEQ ID NO:377, SEQ ID NO:378, SEQ ID NO:379, SEQ ID NO:380, SEQ ID NO:381, SEQ ID NO:382, SEQ ID NO:383, SEQ ID NO:384, SEQ ID NO:385, SEQ ID NO:386, SEQ ID NO:387, SEQ ID NO:388, SEQ ID NO:389, SEQ ID NO:390, SEQ ID NO:391, SEQ ID NO:392, SEQ ID NO:393, SEQ ID NO:394, SEQ ID NO:395, SEQ ID NO:396, SEQ ID NO:397, SEQ ID NO:398, SEQ ID NO:399, SEQ ID NO:400, SEQ ID NO:401, SEQ ID NO:402, SEQ ID NO:403, SEQ ID NO:404, SEQ ID NO:405, SEQ ID NO:406, SEQ ID NO:407, SEQ ID NO:408, SEQ ID NO:409, SEQ ID NO:410, SEQ ID NO:411, SEQ ID NO:412, SEQ ID NO:413, SEQ ID NO:414, SEQ ID NO:415, SEQ ID NO:416, SEQ ID NO:417, SEQ ID NO:418, SEQ ID NO:419, SEQ ID NO:420, SEQ ID NO:421, SEQ ID NO:422, SEQ ID NO:423, SEQ ID NO:424, SEQ ID NO:425, SEQ ID NO:426, SEQ ID NO:427, SEO ID NO:428, SEQ ID NO:429, SEQ ID NO:430, SEQ ID NO:431, SEQ ID NO:432, SEQ ID NO:433, SEQ ID NO:434, SEQ ID NO:435, SEQ ID NO:436, SEQ ID NO:437, SEQ ID NO:438, SEQ ID NO:439, SEQ ID NO:440, SEQ ID NO:441, SEQ ID NO:442, SEQ ID NO:443, SEQ ID NO:444, SEQ ID NO:445, SEQ ID NO:446, SEQ ID NO:447, SEQ ID NO:448, SEQ ID NO:449, SEQ ID NO:450, SEQ ID NO:451, SEQ ID NO:452, SEQ ID NO:453, SEQ ID NO:454, SEQ ID NO:455, SEQ ID NO:456, SEQ ID NO:457, SEQ ID NO:458, SEQ ID NO:459, SEQ ID NO:460, SEQ ID NO:461, SEQ ID NO:462, SEQ ID NO:463, SEQ ID NO:464, SEQ ID NO:465, SEQ ID NO:466, SEQ ID NO:467, SEQ ID NO:468, SEQ ID NO:469, SEQ ID NO:470, SEQ ID NO:471, SEQ ID NO:472, SEQ ID NO:473, SEQ ID NO:474, SEQ ID NO:475, SEQ ID NO:476, SEQ ID NO:477, SEQ ID NO:478, SEQ ID NO:479, SEQ ID NO:480, SEQ ID NO:481, SEQ ID NO:482, SEQ ID NO:483, SEQ ID NO:484, SEQ ID NO:485, SEQ ID NO:486, SEQ ID NO:487, SEQ ID NO:488, SEQ ID NO:489, SEQ ID NO:490, SEQ ID NO:491, SEQ ID NO:492, SEQ ID NO:493, SEQ ID NO:494, SEQ ID NO:495, SEQ ID NO:496, SEQ ID NO:497, SEQ ID NO:498, SEQ ID NO:499, SEQ ID NO:500, SEQ ID NO:501, SEQ ID NO:502, SEQ ID NO:503, SEQ ID NO:504, SEQ ID NO:505, SEQ ID NO:506, SEQ ID NO:507, SEQ ID NO:508, SEQ ID NO:509, SEQ ID NO:510, SEQ ID NO:511, SEQ ID NO:512, SEQ ID NO:513, SEQ ID NO:514, SEQ ID NO:515, SEQ ID NO:516, SEQ ID NO:517, SEQ ID NO:518, SEQ ID NO:519, SEQ ID NO:520, SEQ ID NO:521, SEQ ID NO:522, SEQ ID NO:523, SEQ ID NO:524, SEQ ID NO:525, SEQ ID NO:526, SEQ ID NO:527, SEQ ID NO:528, SEQ ID NO:529, SEQ ID NO:530, SEQ ID NO:531, SEQ ID NO:532, SEQ ID NO:533, SEQ ID NO:534, SEQ ID NO:535, SEQ ID NO:536, SEQ ID NO:537, SEQ ID NO:538, SEQ ID NO:539, SEQ ID NO:540, SEQ ID NO:541, SEQ ID NO:542, SEQ ID NO:543, SEQ ID NO:544, SEQ ID NO:545, SEQ ID NO:546, SEQ ID NO:547, SEQ ID NO:548, SEQ ID NO:549, SEQ ID NO:550, SEQ ID NO:551, SEQ ID NO:552, SEQ ID NO:553, SEQ ID NO:554, SEQ ID NO:555, SEQ ID NO:556, SEQ ID NO:557, SEQ ID NO:558, SEQ ID NO:559, SEQ ID NO:560, SEQ ID NO:561, SEQ ID NO:562, SEQ ID NO:563, SEQ ID NO:564, SEQ ID NO:565, SEQ ID NO:566, SEQ ID NO:567, SEQ ID NO:568, SEQ ID NO:569, SEQ ID NO:570, SEQ ID NO:571, SEQ ID NO:572, SEQ ID NO:573, SEQ ID NO:574, SEQ ID NO:575, SEQ ID NO:576, SEQ ID NO:577, SEQ ID NO:578, SEQ ID NO:579, SEQ ID NO:580, SEQ ID NO:581, SEQ ID NO:582, SEQ ID NO:583, SEQ ID NO:584, SEQ ID NO:585, SEQ ID NO:586, SEQ ID NO:587, SEQ ID NO:588, SEQ ID NO:589, SEQ ID NO:590, SEQ ID NO:591, SEQ ID NO:592, SEQ ID NO:593, SEQ ID NO:594, SEQ ID NO:595, SEQ ID NO:596, SEQ ID NO:597, SEQ ID NO:598, SEQ ID NO:599, SEQ ID NO:600, SEQ ID NO:601, SEQ ID NO:602, SEQ ID NO:603, SEQ ID NO:604, SEQ ID NO:605, SEQ ID NO:606, SEQ ID NO:607, SEQ ID NO:608, SEQ ID NO:609, SEQ ID NO:610, SEQ ID NO:611, SEQ ID NO:612, SEQ ID NO:613, SEQ ID NO:614, SEQ ID NO:615, SEQ ID NO:616, SEQ ID NO:617, SEQ ID NO:618, SEQ ID NO:619, SEQ ID NO:620, SEQ ID NO:621, SEQ ID NO:622, SEQ ID NO:623, SEQ ID NO:624, SEQ ID NO:625; or a complement of said sequence.

[0016] In yet other embodiments, the present invention provides an isolated polynucleotide comprising a nucleotide sequence which hybridizes to a sequence selected from the group consisting of:

[0017] SEQ ID NO:1, SEQ ID NO:2, SEQ ID NO:3, SEQ ID NO:4, SEQ ID NO:5, SEQ ID NO:6, SEQ ID NO:7, SEQ ID NO:8, SEQ ID NO:9, SEQ ID NO:10, SEQ ID NO:11, SEQ ID NO:12, SEQ ID NO:13, SEQ ID NO:14, SEQ ID NO:15, SEQ ID NO:16, SEQ ID NO:17, SEQ ID NO:18, SEQ ID NO:19, SEQ ID NO:20, SEQ ID NO:21, SEQ ID NO:22, SEQ ID NO:23, SEQ ID NO:24, SEQ ID NO:25, SEQ ID NO:26, SEQ ID NO:27, SEQ ID NO:28, SEQ ID NO:29, SEQ ID NO:30, SEQ ID NO:31, SEQ ID NO:32, SEQ ID NO:33, SEQ ID NO:34, SEQ ID NO:35, SEQ ID NO:36, SEQ ID NO:37, SEQ ID NO:38, SEQ ID NO:39, SEQ ID NO:40, SEQ ID NO:41, SEQ ID NO:42, SEQ ID NO:43, SEQ ID NO:44, SEQ ID NO:45, SEQ ID NO:46, SEQ ID NO:47, SEQ ID NO:48, SEQ ID NO:49, SEQ ID NO:50, SEQ ID NO:51, SEQ ID NO:52, SEQ ID NO:53, SEQ ID NO:54, SEQ ID NO:55, SEQ ID NO:56, SEQ ID NO:57, SEQ ID NO:58, SEQ ID NO:59, SEQ ID NO:60, SEQ ID NO:61, SEQ ID NO:62, SEQ ID NO:63, SEQ ID NO:64, SEQ ID NO:65, SEQ ID NO:66, SEQ ID NO:67, SEQ ID NO:68, SEQ ID NO:69, SEQ ID NO:70, SEQ ID NO:71, SEQ ID NO:72, SEQ ID NO:73, SEQ ID NO:74, SEQ ID NO:75, SEQ ID NO:76, SEQ ID NO:77, SEQ ID NO:78, SEQ ID NO:79, SEQ ID NO:80, SEQ ID NO:81, SEQ ID NO:82, SEQ ID NO:83, SEQ ID NO:84, SEQ ID NO:85, SEQ ID NO:86, SEQ ID NO:87, SEQ ID NO:88, SEQ ID NO:89, SEQ ID NO:90, SEQ ID NO:91, SEQ ID NO:92, SEQ ID NO:93, SEQ ID NO:94, SEQ ID NO:95, SEQ ID NO:96, SEQ ID NO:97, SEQ ID NO:98, SEQ ID NO:99, SEQ ID NO:100, SEQ ID NO:101, SEQ ID NO:102, SEQ ID NO:103, SEQ ID NO:104, SEQ ID NO:105, SEQ ID NO:106, SEQ ID NO:107, SEQ ID NO:108, SEQ ID NO:109, SEQ ID NO:110, SEQ ID NO:111, SEQ ID NO:112, SEQ ID NO:113, SEQ ID NO:114, SEQ ID NO:115, SEQ ID NO:116, SEQ ID NO:117, SEQ ID NO:118, SEQ ID NO:119, SEQ ID NO:120, SEQ ID NO:121, SEQ ID NO:122, SEQ ID NO:123, SEQ ID NO:124, SEQ ID NO:125, SEQ ID NO:126, SEQ ID NO:127, SEQ ID NO:128, SEQ ID NO:129, SEQ ID NO:130, SEQ ID NO:131, SEQ ID NO:132, SEQ ID NO:133, SEQ ID NO:134, SEQ ID NO:135, SEQ ID NO:136, SEQ ID NO:137, SEQ ID NO:138, SEQ ID NO:139, SEQ ID NO:140, SEQ ID NO:141, SEQ ID NO:142, SEQ ID NO:143, SEQ ID NO:144, SEQ ID NO:145, SEQ ID NO:146, SEQ ID NO:147, SEQ ID NO:148, SEQ ID NO:149, SEQ ID NO:150, SEQ ID NO:151, SEQ ID NO:152, SEQ ID NO:153, SEQ ID NO:154, SEQ ID NO:155, SEQ ID NO:156, SEQ ID NO:157, SEQ ID NO:158, SEQ ID NO:159, SEQ ID NO:160, SEQ ID NO:161, SEQ ID NO:162, SEQ ID NO:163, SEQ ID NO:164, SEQ ID NO:165, SEQ ID NO:166, SEQ ID NO:167, SEQ ID NO:168, SEQ ID NO:169, SEQ ID NO:170, SEQ ID NO:171, SEQ ID NO:172, SEQ ID NO:173, SEQ ID NO:174, SEQ ID NO:175, SEQ ID NO:176, SEQ ID NO:177, SEQ ID NO:178, SEQ ID NO:179, SEQ ID NO:180, SEQ ID NO:181, SEQ ID NO:182, SEQ ID NO:183, SEQ ID NO:184, SEQ ID NO:185, SEQ ID NO:186, SEQ ID NO:187, SEQ ID NO:188, SEQ ID NO:189, SEQ ID NO:190, SEQ ID NO:191, SEQ ID NO:192, SEQ ID NO:193, SEQ ID NO:194, SEQ ID NO:195, SEQ ID NO:196, SEQ ID NO:197, SEQ ID NO:198, SEQ ID NO:199, SEQ ID NO:200, SEQ ID NO:201, SEQ ID NO:202, SEQ ID NO:203, SEQ ID NO:204, SEQ ID NO:205, SEQ ID NO:206, SEQ ID NO:207, SEQ ID NO:208, SEQ ID NO:209, SEQ ID NO:210, SEQ ID NO:211, SEQ ID NO:212, SEQ ID NO:213, SEQ ID NO:214, SEQ ID NO:215, SEQ ID NO:216, SEQ ID NO:217, SEQ ID NO:218, SEQ ID NO:219, SEQ ID NO:220, SEQ ID NO:221, SEQ ID NO:222, SEQ ID NO:223, SEQ ID NO:224, SEQ ID NO:225, SEQ ID NO:226, SEQ ID NO:227, SEQ ID NO:228, SEQ ID NO:229, SEQ ID NO:230, SEQ ID NO:231, SEQ ID NO:232, SEQ ID NO:233, SEQ ID NO:234, SEQ ID NO:235, SEQ ID NO:236, SEQ ID NO:237, SEQ ID NO:238, SEQ ID NO:239, SEQ ID NO:240, SEQ ID NO:241, SEQ ID NO:242, SEQ ID NO:243, SEQ ID NO:244, SEQ ID NO:245, SEQ ID NO:246, SEQ ID NO:247, SEQ ID NO:248, SEQ ID NO:249, SEQ ID NO:250, SEQ ID NO:251, SEQ ID NO:252, SEQ ID NO:253, SEQ ID NO:254, SEQ ID NO:255, SEQ ID NO:256, SEQ ID NO:257, SEQ ID NO:258, SEQ ID NO:259, SEQ ID NO:260, SEQ ID NO:261, SEQ ID NO:262, SEQ ID NO:263, SEQ ID NO:264, SEQ ID NO:265, SEQ ID NO:266, SEQ ID NO:267, SEQ ID NO:268, SEQ ID NO:269, SEQ ID NO:270, SEQ ID NO:271, SEQ ID NO:272, SEQ ID NO:273, SEQ ID NO:274, SEQ ID NO:275, SEQ ID NO:276, SEQ ID NO:277, SEQ ID NO:278, SEQ ID NO:279, SEQ ID NO:280, SEQ ID NO:281, SEQ ID NO:282, SEQ ID NO:283, SEQ ID NO:284, SEQ ID NO:285, SEQ ID NO:286, SEQ ID NO:287, SEQ ID NO:288, SEQ ID NO:289, SEQ ID NO:290, SEQ ID NO:291, SEQ ID NO:292, SEQ ID NO:293, SEQ ID NO:294, SEQ ID NO:295, SEQ ID NO:296, SEQ ID NO:297, SEQ ID NO:298, SEQ ID NO:299, SEQ ID NO:300, SEQ ID NO:301, SEQ ID NO:302, SEQ ID NO:303, SEQ ID NO:304, SEQ ID NO:305, SEQ ID NO:306, SEQ ID NO:307, SEQ ID NO:308, SEQ ID NO:309, SEQ ID NO:310, SEQ ID NO:311, SEQ ID NO:312, SEQ ID NO:313, SEQ ID NO:314, SEQ ID NO:315, SEQ ID NO:316, SEQ ID NO:317, SEQ ID NO:318, SEQ ID NO:319, SEQ ID NO:320, SEQ ID NO:321, SEQ ID NO:322, SEQ ID NO:323, SEQ ID NO:324, SEQ ID NO:325, SEQ ID NO:326, SEQ ID NO:327, SEQ ID NO:328, SEQ ID NO:329, SEQ ID NO:330, SEQ ID NO:331, SEQ ID NO:332, SEQ ID NO:333, SEQ ID NO:334, SEQ ID NO:335, SEQ ID NO:336, SEQ ID NO:337, SEQ ID NO:338, SEQ ID NO:339, SEQ ID NO:340, SEQ ID NO:341, SEQ ID NO:342, SEQ ID NO:343, SEQ ID NO:344, SEQ ID NO:345, SEQ ID NO:346, SEQ ID NO:347, SEQ ID NO:348, SEQ ID NO:349, SEQ ID NO:350, SEQ ID NO:31, SEQ ID NO:352, SEQ ID NO:353, SEQ ID NO:354, SEQ ID NO:355, SEQ ID NO:356, SEQ ID NO:357, SEQ ID NO:358, SEQ ID NO:359, SEQ ID NO:360, SEQ ID NO:361, SEQ ID NO:362, SEQ ID NO:363, SEQ ID NO:364, SEQ ID NO:365, SEQ ID NO:366, SEQ ID NO:367, SEQ ID NO:368, SEQ ID NO:369, SEQ ID NO:370, SEQ ID NO:371, SEQ ID NO:372, SEQ ID NO:373, SEQ ID NO:374, SEQ ID NO:375, SEQ ID NO:376, SEQ ID NO:377, SEQ ID NO:378, SEQ ID NO:379, SEQ ID NO:380, SEQ ID NO:381, SEQ ID NO:382, SEQ ID NO:383, SEQ ID NO:384, SEQ ID NO:385, SEQ ID NO:386, SEQ ID NO:387, SEQ ID NO:388, SEQ ID NO:389, SEQ ID NO:390, SEQ ID NO:391, SEQ ID NO:392, SEQ ID NO:393, SEQ ID NO:394, SEQ ID NO:395, SEQ ID NO:396, SEQ ID NO:397, SEQ ID NO:398, SEQ ID NO:399, SEQ ID NO:400, SEQ ID NO:401, SEQ ID NO:402, SEQ ID NO:403, SEQ ID NO:404, SEQ ID NO:405, SEQ ID NO:406, SEQ ID NO:407, SEQ ID NO:408, SEQ ID NO:409, SEQ ID NO:410, SEQ ID NO:411, SEQ ID NO:412, SEQ ID NO:413, SEQ ID NO:414, SEQ ID NO:415, SEQ ID NO:416, SEQ ID NO:417, SEQ ID NO:418, SEQ ID NO:419, SEQ ID NO:420, SEQ ID NO:421, SEQ ID NO:422, SEQ ID NO:423, SEQ ID NO:424, SEQ ID NO:425, SEQ ID NO:426, SEQ ID NO:427, SEQ ID NO:428, SEQ ID NO:429, SEQ ID NO:430, SEQ ID NO:431, SEQ ID NO:432, SEQ ID NO:433, SEQ ID NO:434, SEQ ID NO:435, SEQ ID NO:436, SEQ ID NO:437, SEQ ID NO:438, SEQ ID NO:439, SEQ ID NO:440, SEQ ID NO:441, SEQ ID NO:442, SEQ ID NO:443, SEQ ID NO:444, SEQ ID NO:445, SEQ ID NO:446, SEQ ID NO:447, SEQ ID NO:448, SEQ ID NO:449, SEQ ID NO:450, SEQ ID NO:451, SEQ ID NO:452, SEQ ID NO:453, SEQ ID NO:454, SEQ ID NO:455, SEQ ID NO:456, SEQ ID NO:457, SEQ ID NO:458, SEQ ID NO:459, SEQ ID NO:460, SEQ ID NO:461, SEQ ID NO:462, SEQ ID NO:463, SEQ ID NO:464, SEQ ID NO:465, SEQ ID NO:466, SEQ ID NO:467, SEQ ID NO:468, SEQ ID NO:469, SEQ ID NO:470, SEQ ID NO:471, SEQ ID NO:472, SEQ ID NO:473, SEQ ID NO:474, SEQ ID NO:475, SEQ ID NO:476, SEQ ID NO:477, SEQ ID NO:478, SEQ ID NO:479, SEQ ID NO:480, SEQ ID NO:481, SEQ ID NO:482, SEQ ID NO:483, SEQ ID NO:484, SEQ ID NO:485, SEQ ID NO:486, SEQ ID NO:487, SEQ ID NO:488, SEQ ID NO:489, SEQ ID NO:490, SEQ ID NO:491, SEQ ID NO:492, SEQ ID NO:493, SEQ ID NO:494, SEQ ID NO:495, SEQ ID NO:496, SEQ ID NO:497, SEQ ID NO:498, SEQ ID NO:499, SEQ ID NO:500, SEQ ID NO:501, SEQ ID NO:502, SEQ ID NO:503, SEQ ID NO:504, SEQ ID NO:505, SEQ ID NO:506, SEQ ID NO:507, SEQ ID NO:508, SEQ ID NO:509, SEQ ID NO:510, SEQ ID NO:511, SEQ ID NO:512, SEQ ID NO:513, SEQ ID NO:514, SEQ ID NO:515, SEQ ID NO:516, SEQ ID NO:517, SEQ ID NO:518, SEQ ID NO:519, SEQ ID NO:520, SEQ ID NO:521, SEQ ID NO:522, SEQ ID NO:523, SEQ ID NO:524, SEQ ID NO:525, SEQ ID NO:526, SEQ ID NO:527, SEQ ID NO:528, SEQ ID NO:529, SEQ ID NO:530, SEQ ID NO:531, SEQ ID NO:532, SEQ ID NO:533, SEQ ID NO:534, SEQ ID NO:535, SEQ ID NO:536, SEQ ID NO:537, SEQ ID NO:538, SEQ ID NO:539, SEQ ID NO:540, SEQ ID NO:541, SEQ ID NO:542, SEQ ID NO:543, SEQ ID NO:544, SEQ ID NO:545, SEQ ID NO:546, SEQ ID NO:547, SEQ ID NO:548, SEQ ID NO:549, SEQ ID NO:550, SEQ ID NO:551, SEQ ID NO:552, SEQ ID NO:553, SEQ ID NO:554, SEQ ID NO:555, SEQ ID NO:556, SEQ ID NO:557, SEQ ID NO:558, SEQ ID NO:559, SEQ ID NO:560, SEQ ID NO:561, SEQ ID NO:562, SEQ ID NO:563, SEQ ID NO:564, SEQ ID NO:565, SEQ ID NO:566, SEQ ID NO:567, SEQ ID NO:568, SEQ ID NO:569, SEQ ID NO:570, SEQ ID NO:571, SEQ ID NO:572, SEQ ID NO:573, SEQ ID NO:574, SEQ ID NO:575, SEQ ID NO:576, SEQ ID NO:577, SEQ ID NO:578, SEQ ID NO:579, SEQ ID NO:580, SEQ ID NO:581, SEQ ID NO:582, SEQ ID NO:583, SEQ ID NO:584, SEQ ID NO:585, SEQ ID NO:586, SEQ ID NO:587, SEQ ID NO:588, SEQ ID NO:589, SEQ ID NO:590, SEQ ID NO:591, SEQ ID NO:592, SEQ ID NO:593, SEQ ID NO:594, SEQ ID NO:595, SEQ ID NO:596, SEQ ID NO:597, SEQ ID NO:598, SEQ ID NO:599, SEQ ID NO:600, SEQ ID NO:601, SEQ ID NO:602, SEQ ID NO:603, SEQ ID NO:604, SEQ ID NO:605, SEQ ID NO:606, SEQ ID NO:607, SEQ ID NO:608, SEQ ID NO:609, SEQ ID NO:610, SEQ ID NO:611, SEQ ID NO:612, SEQ ID NO:613, SEQ ID NO:614, SEQ ID NO:615, SEQ ID NO:616, SEQ ID NO:617, SEQ ID NO:618, SEQ ID NO:619, SEQ ID NO:620, SEQ ID NO:621, SEQ ID NO:622, SEQ ID NO:623, SEQ ID NO:624, SEQ ID NO:625; or to a complement of said sequence.

[0018] The invention also provides for proteins encoded by the above-described polynucleotides. In certain preferred embodiments, the polynucleotide is operably linked to an expression control sequence. The invention also provides a host cell, including bacterial, yeast, insect and mammalian cells, transformed with such polynucleotide compositions. Also provided by the present invention are organisms that have enhanced, reduced, or modified expression of the gene(s) corresponding to the polynucleotide sequences disclosed herein.

[0019] Processes are also provided for producing a protein, which comprise:

[0020] (a) growing a culture of the host cell transformed with such polynucleotide compositions in a suitable culture medium; and

[0021] (b) purifying the protein from the culture.

[0022] The protein produced according to such methods is also provided by the present invention.

[0023] Protein compositions of the present invention may further comprise a pharmaceutically acceptable carrier. Compositions comprising an antibody which specifically reacts with such protein are also provided by the present invention.

[0024] Methods are also provided for preventing, treating or ameliorating a medical condition which comprises administering to a mammalian subject a therapeutically effective amount of a composition comprising a protein of the present invention, and/or a polynucleotide of the present invention, and a pharmaceutically acceptable carrier.

### DETAILED DESCRIPTION

[0025] The nucleotide sequences of the isolated cDNAs of the present invention are reported in the Sequence Listing below. Table 2 lists the “Clone ID Nos.” assigned by applicants to each SEQ ID NO: in the Sequence Listing.

[0026] Table 2

[0027] Each pair of entries in this table consists of the SEQ ID NO (e.g., 1, 2, etc.) followed by the Clone ID No. for such sequence (e.g., YD123_{—}1, YD124_{—}1, etc.).

| | | | | | | | |
|---|---|---|---|---|---|---|---|
| 1 | YD123_1 | 201 | YD321_1 | 401 | YE56_1 | 601 | YH95_1 |
| 2 | YD124_1 | 202 | YD322_1 | 402 | YE57_1 | 602 | YH96_1 |
| 3 | YD125_1 | 203 | YD323_1 | 403 | YE58_1 | 603 | YH97_1 |
| 4 | YD126_1 | 204 | YD324_1 | 404 | YE59_1 | 604 | YH99_1 |
| 5 | YD127_1 | 205 | YD325_1 | 405 | YE5_1 | 605 | YH9_1 |
| 6 | YD128_1 | 206 | YD326_1 | 406 | YE60_1 | 606 | YHA2_1 |
| 7 | YD129_1 | 207 | YD327_1 | 407 | YE61_1 | 607 | YHA3_1 |
| 8 | YD12_1 | 208 | YD328_1 | 408 | YE62_1 | 608 | YHA4_1 |
| 9 | YD130_1 | 209 | YD329_1 | 409 | YE63_1 | 609 | YHA5_1 |
| 10 | YD131_1 | 210 | YD32_1 | 410 | YE64_1 | 610 | YHA6_1 |
| 11 | YD132_1 | 211 | YD330_1 | 411 | YE65_1 | 611 | YI101_1 |
| 12 | YD133_1 | 212 | YD331_1 | 412 | YE66_1 | 612 | YI102_1 |
| 13 | YD134_1 | 213 | YD332_1 | 413 | YE67_1 | 613 | YI103_1 |
| 14 | YD135_1 | 214 | YD333_1 | 414 | YE68_1 | 614 | YI104_1 |
| 15 | YD136_1 | 215 | YD334_1 | 415 | YE69_1 | 615 | YI106_1 |
| 16 | YD138_1 | 216 | YD335_1 | 416 | YE6_1 | 616 | YI107_1 |
| 17 | YD139_1 | 217 | YD336_1 | 417 | YE70_1 | 617 | YI108_1 |
| 18 | YD13_1 | 218 | YD337_1 | 418 | YE71_1 | 618 | YI109_1 |
| 19 | YD140_1 | 219 | YD338_1 | 419 | YE73_1 | 619 | YI10_1 |
| 20 | YD142_1 | 220 | YD339_1 | 420 | YE74_1 | 620 | YI110_1 |
| 21 | YD143_1 | 221 | YD33_1 | 421 | YE75_1 | 621 | YI111_1 |
| 22 | YD144_1 | 222 | YD340_1 | 422 | YE76_1 | 622 | YI112_1 |
| 23 | YD146_1 | 223 | YD341_1 | 423 | YE77_1 | 623 | YI113_1 |
| 24 | YD147_1 | 224 | YD342_1 | 424 | YE79_1 | 624 | YI114_1 |
| 25 | YD148_1 | 225 | YD343_1 | 425 | YE80_1 | 625 | YI115_1 |
| 26 | YD149_1 | 226 | YD344_1 | 426 | YE81_1 | | |
| 27 | YD14_1 | 227 | YD345_1 | 427 | YE82_1 | | |
| 28 | YD150_1 | 228 | YD346_1 | 428 | YE83_1 | | |
| 29 | YD151_1 | 229 | YD347_1 | 429 | YE84_1 | | |
| 30 | YD152_1 | 230 | YD348_1 | 430 | YE85_1 | | |
| 31 | YD154_1 | 231 | YD349_1 | 431 | YE86_1 | | |
| 32 | YD155_1 | 232 | YD350_1 | 432 | YE87_1 | | |
| 33 | YD157_1 | 233 | YD351_1 | 433 | YE88_1 | | |
| 34 | YD158_1 | 234 | YD352_1 | 434 | YE89_1 | | |
| 35 | YD159_1 | 235 | YD353_1 | 435 | YE8_1 | | |
| 36 | YD15_1 | 236 | YD354_1 | 436 | YE91_1 | | |
| 37 | YD160_1 | 237 | YD355_1 | 437 | YE92_1 | | |
| 38 | YD161_1 | 238 | YD356_1 | 438 | YE93_1 | | |
| 39 | YD162_1 | 239 | YD357_1 | 439 | YE94_1 | | |
| 40 | YD163_1 | 240 | YD358_1 | 440 | YE95_1 | | |
| 41 | YD164_1 | 241 | YD359_1 | 441 | YE96_1 | | |
| 42 | YD166_1 | 242 | YD35_1 | 442 | YE97_1 | | |
| 43 | YD167_1 | 243 | YD360_1 | 443 | YE98_1 | | |
| 44 | YD168_1 | 244 | YD361_1 | 444 | YE99_1 | | |
| 45 | YD169_1 | 245 | YD362_1 | 445 | YE9_1 | | |
| 46 | YD16_1 | 246 | YD363_1 | 446 | YEA2_1 | | |
| 47 | YD170_1 | 247 | YD364_1 | 447 | YEA3_1 | | |
| 48 | YD171_1 | 248 | YD365_1 | 448 | YF10_1 | | |
| 49 | YD172_1 | 249 | YD366_1 | 449 | YF13_1 | | |
| 50 | YD173_1 | 250 | YD367_1 | 450 | YF14_1 | | |
| 51 | YD174_1 | 251 | YD368_1 | 451 | YF15_1 | | |
| 52 | YDI75_1 | 252 | YD369_1 | 452 | YF16_1 | | |
| 53 | YD176_1 | 253 | YD36_1 | 453 | YF17_1 | | |
| 54 | YD177_1 | 254 | YD370_1 | 454 | YF18_1 | | |
| 55 | YD179_1 | 255 | YD371_1 | 455 | YF19_1 | | |
| 56 | YD17_1 | 256 | YD372_1 | 456 | YF20_1 | | |
| 57 | YD180_1 | 257 | YD373_1 | 457 | YF21_1 | | |
| 58 | YD182_1 | 258 | YD374_1 | 458 | YF22_1 | | |
| 59 | YD183_1 | 259 | YD375_1 | 459 | YF23_1 | | |
| 60 | YD184_1 | 260 | YD376_1 | 460 | YF24_1 | | |
| 61 | YD185_1 | 261 | YD37_1 | 461 | YF25_1 | | |
| 62 | YD186_1 | 262 | YD382_1 | 462 | YF27_1 | | |
| 63 | YD187_1 | 263 | YD385_1 | 463 | YF28_1 | | |
| 64 | YD188_1 | 264 | YD387_1 | 464 | YF29_1 | | |
| 65 | YD189_1 | 265 | YD389_1 | 465 | YF30_1 | | |
| 66 | YD18_1 | 266 | YD38_1 | 466 | YF31_1 | | |
| 67 | YD190_1 | 267 | YD391_1 | 467 | YF32_1 | | |
| 68 | YD192_1 | 268 | YD39_1 | 468 | YF34_1 | | |
| 69 | YD193_1 | 269 | YD406_1 | 469 | YF35_1 | | |
| 70 | YD194_1 | 270 | YD41_1 | 470 | YF36_1 | | |
| 71 | YD195_1 | 271 | YD42_1 | 471 | YF37_1 | | |
| 72 | YD196_1 | 272 | YD43_1 | 472 | YF38_1 | | |
| 73 | YD197_1 | 273 | YD44_1 | 473 | YF39_1 | | |
| 74 | YD198_1 | 274 | YD45_1 | 474 | YF3_1 | | |
| 75 | YD199_1 | 275 | YD48_1 | 475 | YF40_1 | | |
| 76 | YD19_1 | 276 | YD49_1 | 476 | YF41_1 | | |
| 77 | YD200_1 | 277 | YD52_1 | 477 | YF42_1 | | |
| 78 | YD201_1 | 278 | YD53_1 | 478 | YF43_1 | | |
| 79 | YD202_1 | 279 | YD54_1 | 479 | YF44_1 | | |
| 80 | YD203_1 | 280 | YD55_1 | 480 | YF45_1 | | |
| 81 | YD204_1 | 281 | YD56_1 | 481 | YF46_1 | | |
| 82 | YD205_1 | 282 | YD57_1 | 482 | YF47_1 | | |
| 83 | YD208_1 | 283 | YD58_1 | 483 | YF48_1 | | |
| 84 | YD209_1 | 284 | YD59_1 | 484 | YF51_1 | | |
| 85 | YD20_1 | 285 | YD5_1 | 485 | YF52_1 | | |
| 86 | YD210_1 | 286 | YD60_1 | 486 | YF53_1 | | |
| 87 | YD211_1 | 287 | YD62_1 | 487 | YF54_1 | | |
| 88 | YD212_1 | 288 | YD63_1 | 488 | YF55_1 | | |
| 89 | YD213_1 | 289 | YD65_1 | 489 | YF56_1 | | |
| 90 | YD214_1 | 290 | YD66_1 | 490 | YF58_1 | | |
| 91 | YD215_1 | 291 | YD67_1 | 491 | YF6_1 | | |
| 92 | YD216_1 | 292 | YD68_1 | 492 | YF8_1 | | |
| 93 | YD217_1 | 293 | YD69_1 | 493 | YFA1_1 | | |
| 94 | YD219_1 | 294 | YD6_1 | 494 | YFA2_1 | | |
| 95 | YD21_1 | 295 | YD70_1 | 495 | YFA3_1 | | |
| 96 | YD221_1 | 296 | YD71_1 | 496 | YFA4_1 | | |
| 97 | YD222_1 | 297 | YD72_1 | 497 | YFA5_1 | | |
| 98 | YD223_1 | 298 | YD74_1 | 498 | YGA1_1 | | |
| 99 | YD224_1 | 299 | YD75_1 | 499 | YGA2_1 | | |
| 100 | YD225_1 | 300 | YD76_1 | 500 | YGA4_1 | | |
| 101 | YD226_1 | 301 | YD77_1 | 501 | YH101_1 | | |
| 102 | YD227_1 | 302 | YD78_1 | 502 | YH102_1 | | |
| 103 | YD228_1 | 303 | YD79_1 | 503 | YH103_1 | | |
| 104 | YD229_1 | 304 | YD7_1 | 504 | YH104_1 | | |
| 105 | YD22_1 | 305 | YD80_1 | 505 | YH105_1 | | |
| 106 | YD230_1 | 306 | YD81_1 | 506 | YH106_1 | | |
| 107 | YD231_1 | 307 | YD82_1 | 507 | YH108_1 | | |
| 108 | YD232_1 | 308 | YD83_1 | 508 | YH109_1 | | |
| 109 | YD233_1 | 309 | YD84_1 | 509 | YH10_1 | | |
| 110 | YD234_1 | 310 | YD85_1 | 510 | YH110_1 | | |
| 111 | YD235_1 | 311 | YD86_1 | 511 | YH111_1 | | |
| 112 | YD236_1 | 312 | YD87_1 | 512 | YH112_1 | | |
| 113 | YD237_1 | 313 | YD89_1 | 513 | YH113_1 | | |
| 114 | YD238_1 | 314 | YD8_1 | 514 | YH114_1 | | |
| 115 | YD239_1 | 315 | YD90_1 | 515 | YH115_1 | | |
| 116 | YD23_1 | 316 | YD91_1 | 516 | YH116_1 | | |
| 117 | YD240_1 | 317 | YD92_1 | 517 | YH117_1 | | |
| 118 | YD241_1 | 318 | YD93_1 | 518 | YH118_1 | | |
| 119 | YD242_1 | 319 | YD94_1 | 519 | YH119_1 | | |
| 120 | YD243_1 | 320 | YD95_1 | 520 | YH11_1 | | |
| 121 | YD244_1 | 321 | YD97_1 | 521 | YH120_1 | | |
| 122 | YD245_1 | 322 | YD98_1 | 522 | YH122_1 | | |
| 123 | YD246_1 | 323 | YD99_1 | 523 | YH123_1 | | |
| 124 | YD247_1 | 324 | YD9_1 | 524 | YH12_1 | | |
| 125 | YD248_1 | 325 | YDA10_1 | 525 | YH13_1 | | |
| 126 | YD249_1 | 326 | YDA11_1 | 526 | YH14_1 | | |
| 127 | YD24_1 | 327 | YDA12_1 | 527 | YH15_1 | | |
| 128 | YD250_1 | 328 | YDA1_1 | 528 | YH16_1 | | |
| 129 | YD251_1 | 329 | YDA2_1 | 529 | YH17_1 | | |
| 130 | YD252_1 | 330 | YDA3_1 | 530 | YH18_1 | | |
| 131 | YD253_1 | 331 | YDA4_1 | 531 | YH19_1 | | |
| 132 | YD254_1 | 332 | YDA5_1 | 532 | YH1_1 | | |
| 133 | YD255_1 | 333 | YDA6_1 | 533 | YH21_1 | | |
| 134 | YD256_1 | 334 | YDA7_1 | 534 | YH22_1 | | |
| 135 | YD257_1 | 335 | YE100_1 | 535 | YH23_1 | | |
| 136 | YD258_1 | 336 | YE101_1 | 536 | YH25_1 | | |
| 137 | YD259_1 | 337 | YE102_1 | 537 | YH26_1 | | |
| 138 | YD260_1 | 338 | YE104_1 | 538 | YH27_1 | | |
| 139 | YD262_1 | 339 | YE105_1 | 539 | YH28_1 | | |
| 140 | YD263_1 | 340 | YE106_1 | 540 | YH29_1 | | |
| 141 | YD264_1 | 341 | YE107_1 | 541 | YH30_1 | | |
| 142 | YD265_1 | 342 | YE109_1 | 542 | YH32_1 | | |
| 143 | YD266_1 | 343 | YE10_1 | 543 | YH34_1 | | |
| 144 | YD267_1 | 344 | YE110_1 | 544 | YH35_1 | | |
| 145 | YD268_1 | 345 | YE111_1 | 545 | YH37_1 | | |
| 146 | YD269_1 | 346 | YE112_1 | 546 | YH38_1 | | |
| 147 | YD270_1 | 347 | YE113_1 | 547 | YH3_1 | | |
| 148 | YD271_1 | 348 | YE114_1 | 548 | YH40_1 | | |
| 149 | YD272_1 | 349 | YE115_1 | 549 | YH41_1 | | |
| 150 | YD273_1 | 350 | YE116_1 | 550 | YH42_1 | | |
| 151 | YD274_1 | 351 | YE117_1 | 551 | YH43_1 | | |
| 152 | YD275_1 | 352 | YE118_1 | 552 | YH44_1 | | |
| 153 | YD276_1 | 353 | YE119_1 | 553 | YH45_1 | | |
| 154 | YD277_1 | 354 | YE120_1 | 554 | YH46_1 | | |
| 155 | YD278_1 | 355 | YE121_1 | 555 | YH47_1 | | |
| 156 | YD279_1 | 356 | YE122_1 | 556 | YH48_1 | | |
| 157 | YD27_1 | 357 | YE123_1 | 557 | YH49_1 | | |
| 158 | YD280_1 | 358 | YE124_1 | 558 | YH51_1 | | |
| 159 | YD281_1 | 359 | YE125_1 | 559 | YH52_1 | | |
| 160 | YD282_1 | 360 | YE126_1 | 560 | YH54_1 | | |
| 161 | YD283_1 | 361 | YE127_1 | 561 | YH55_1 | | |
| 162 | YD284_1 | 362 | YE128_1 | 562 | YH56_1 | | |
| 163 | YD285_1 | 363 | YE129_1 | 563 | YH57_1 | | |
| 164 | YD286_1 | 364 | YE130_1 | 564 | YH58_1 | | |
| 165 | YD287_1 | 365 | YE131_1 | 565 | YH59_1 | | |
| 166 | YD288_1 | 366 | YE132_1 | 566 | YH5_1 | | |
| 167 | YD289_1 | 367 | YE133_1 | 567 | YH60_1 | | |
| 168 | YD28_1 | 368 | YE135_1 | 568 | YH61_1 | | |
| 169 | YD290_1 | 369 | YE13_1 | 569 | YH62_1 | | |
| 170 | YD291_1 | 370 | YE15_1 | 570 | YH63_1 | | |
| 171 | YD292_1 | 371 | YE16_1 | 571 | YH64_1 | | |
| 172 | YD293_1 | 372 | YE1_1 | 572 | YH65_1 | | |
| 173 | YD294_1 | 373 | YE20_1 | 573 | YH66_1 | | |
| 174 | YD295_1 | 374 | YE23_1 | 574 | YH67_1 | | |
| 175 | YD296_1 | 375 | YE24_1 | 575 | YH68_1 | | |
| 176 | YD297_1 | 376 | YE26_1 | 576 | YH6_1 | | |
| 177 | YD298_1 | 377 | YE27_1 | 577 | YH70_1 | | |
| 178 | YD299_1 | 378 | YE28_1 | 578 | YH72_1 | | |
| 179 | YD300_1 | 379 | YE29_1 | 579 | YH73_1 | | |
| 180 | YD301_1 | 380 | YE31_1 | 580 | YH74_1 | | |
| 181 | YD302_1 | 381 | YE32_1 | 581 | YH75_1 | | |
| 182 | YD303_1 | 382 | YE33_1 | 582 | YH76_1 | | |
| 183 | YD304_1 | 383 | YE34_1 | 583 | YH77_1 | | |
| 184 | YD305_1 | 384 | YE35_1 | 584 | YH78_1 | | |
| 185 | YD306_1 | 385 | YE36_1 | 585 | YH79_1 | | |
| 186 | YD307_1 | 386 | YE37_1 | 586 | YH7_1 | | |
| 187 | YD308_1 | 387 | YE38_1 | 587 | YH80_1 | | |
| 188 | YD309_1 | 388 | YE3_1 | 588 | YH82_1 | | |
| 189 | YD30_1 | 389 | YE41_1 | 589 | YH83_1 | | |
| 190 | YD310_1 | 390 | YE42_1 | 590 | YH84_1 | | |
| 191 | YD311_1 | 391 | YE44_1 | 591 | YH85_1 | | |
| 192 | YD312_1 | 392 | YE45_1 | 592 | YH86_1 | | |
| 193 | YD313_1 | 393 | YE46_1 | 593 | YH87_1 | | |
| 194 | YD314_1 | 394 | YE48_1 | 594 | YH88_1 | | |
| 195 | YD315_1 | 395 | YE49_1 | 595 | YH8_1 | | |
| 196 | YD316_1 | 396 | YE50_1 | 596 | YH90_1 | | |
| 197 | YD317_1 | 397 | YE51_1 | 597 | YH91_1 | | |
| 198 | YD318_1 | 398 | YE52_1 | 598 | YH92_1 | | |
| 199 | YD319_1 | 399 | YE54_1 | 599 | YH93_1 | | |
| 200 | YD320_1 | 400 | YE55_1 | 600 | YH94_1 | | |

[0028] The “Clone ID No.” for a particular clone consists of one or two letters followed by a number. The letters designate the tissue source from which the cDNA for that clone was isolated, and these sources are listed in Table 3 below.

TABLE 3

| Sel. | Species | Stage | Tissue | Cell Type | Treatment |
|---|---|---|---|---|---|
| YD | Human | Adult | Brain | N/A | None |
| YDA | Human | Adult | Tonsil | Inflamed | None |
| YE | Human | Fetal | Brain | 19-23 wks., M/F pool | None |
| | | | | of 5 | |
| YEA | Human | Adult | Bladder | 5637 carcinoma line | PMA + |
| | | | | | untreated |
| YF | Human | Fetal | Brain | 19-23 wks., M/F pool | None |
| | | | | of 5 | |
| YFA | Human | Adult | Retina | WERI-Rb1 retino- | None |
| | | | | blastoma line | |
| YGA | Human | Adult | Bladder | 5637 carcinoma line | PMA + |
| | | | | | untreated |
| YH | Human | Mixed | Brain | Fetal and adult brain | None |
| YHA | Human | Adult | Kidney | 293 carcinoma line | None |
| YI | Human | Adult | Brain | N/A | None |

Table 3 Cell Type and Treatment Key:
PMA: phorbol myristate acetate
PMA + untreated: Pool of PMA-treated and untreated cells

[0029] Thus, the tissue source for a particular cDNA sequence can be identified in Table 3 by the one and two letter designations used in the relevant “Clone ID No.” in Table 2. For example, a cDNA clone designated as “YD123_{—}1” would have been isolated from a human adult brain library (i.e., selection “YD”) as indicated in Table 3.

[0030] As used herein, “polynucleotide” includes single- and double-stranded RNAs, DNAs and RNA:DNA hybrids.

[0031] As used herein a “secreted” protein is one which, when expressed in a suitable host cell, is transported across or through a membrane, including transport as a result of signal sequences in its amino acid sequence. “Secreted” proteins include without limitation proteins secreted wholly (e.g., soluble proteins) or partially (e.g., receptors) from the cell in which they are expressed. “Secreted” proteins also include without limitation proteins which are transported across the membrane of the endoplasmic reticulum.

[0032] Fragments of the proteins of the present invention which are capable of exhibiting biological activity are also encompassed by the present invention. Fragments of the protein may be in linear form or they may be cyclized using known methods, for example, as described in H. U. Saragovi, et al., Bio/Technology 10, 773-778 (1992) and in R. S. McDowell, et al., J. Amer. Chem. Soc. 114, 9245-9253 (1992), both of which are incorporated herein by reference. Such fragments may be fused to carrier molecules such as immunoglobulins for many purposes, including increasing the valency of protein binding sites. For example, fragments of the protein may be fused through “linker” sequences to the Fc portion of an immunoglobulin. For a bivalent form of the protein, such a fusion could be to the Fc portion of an IgG molecule. Other immunoglobulin isotypes may also be used to generate such fusions. For example, a protein—IgM fusion would generate a decavalent form of the protein of the invention.

[0033] The present invention also provides both full-length and mature forms of the disclosed proteins. The full-length form of the such proteins is identified in the sequence listing by translation of the nucleotide sequence of each disclosed clone. The mature form(s) of such protein may be obtained by expression of the disclosed full-length polynucleotide (preferably those deposited with ATCC) in a suitable mammalian cell or other host cell. The sequence(s) of the mature form(s) of the protein may also be determinable from the amino acid sequence of the full-length form.

[0034] The present invention also provides genes corresponding to the polynucleotide sequences disclosed herein. “Corresponding genes” are the regions of the genome that are transcribed to produce the mRNAs from which cDNA polynucleotide sequences are derived and may include contiguous regions of the genome necessary for the regulated expression of such genes. Corresponding genes may therefore include but are not limited to coding sequences, 5′ and 3′ untranslated regions, alternatively spliced exons, introns, promoters, enhancers, and silencer or suppressor elements. The corresponding genes can be isolated in accordance with known methods using the sequence information disclosed herein. Such methods include the preparation of probes or primers from the disclosed sequence information for identification and/or amplification of genes in appropriate genomic libraries or other sources of genomic materials. An “isolated gene” is a gene that has been separated from the adjacent coding sequences, if any, present in the genome of the organism from which the gene was isolated.

[0035] The chromosomal location corresponding to the polynucleotide sequences disclosed herein may also be determined, for example by hybridizing appropriately labeled polynucleotides of the present invention to chromosomes in situ. It may also be possible to determine the corresponding chromosomal location for a disclosed polynucleotide by identifying significantly similar nucleotide sequences in public databases, such as expressed sequence tags (ESTs), that have already been mapped to particular chromosomal locations. For at least some of the polynucleotide sequences disclosed herein, public database sequences having at least some similarity to the polynucleotide of the present invention have been listed by database accession number. Searches using the GenBank accession numbers of these public database sequences can then be performed at an Internet site provided by the National Center for Biotechnology Information having the address www.ncbi.nlm.nih.gov/UniGene, in order to identify “UniGene clusters” of overlapping sequences. Many of the “UniGene clusters” so identified will already have been mapped to particular chromosomal sites.

[0036] Organisms that have enhanced, reduced, or modified expression of the gene(s) corresponding to the polynucleotide sequences disclosed herein are provided. The desired change in gene expression can be achieved through the use of antisense polynucleotides or ribozymes that bind and/or cleave the mRNA transcribed from the gene (Albert and Morris, 1994, Trends Pharmacol. Sci. 15(7): 250-254; Lavarosky et al., 1997, Biochem. Mol. Med. 62(1): 11-22; and Hampel, 1998, Prog. Nucleic Acid Res. Mol. Biol. 58: 1-39; all of which are incorporated by reference herein). Transgenic animals that have multiple copies of the gene(s) corresponding to the polynucleotide sequences disclosed herein, preferably produced by transformation of cells with genetic constructs that are stably maintained within the transformed cells and their progeny, are provided. Transgenic animals that have modified genetic control regions that increase or reduce gene expression levels, or that change temporal or spatial patterns of gene expression, are also provided (see European Pat. No. 0 649 464 B1, incorporated by reference herein). In addition, organisms are provided in which the gene(s) corresponding to the polynucleotide sequences disclosed herein have been partially or completely inactivated, through insertion of extraneous sequences into the corresponding gene(s) or through deletion of all or part of the corresponding gene(s). Partial or complete gene inactivation can be accomplished through insertion, preferably followed by imprecise excision, of transposable elements (Plasterk, 1992, Bioessays 14(9): 629-633; Zwaal et al., 1993, Proc. Natl. Acad. Sci. USA 90(16): 7431-7435; Clark et al., 1994, Proc. Natl. Acad. Sci. USA 91(2): 719-722; all of which are incorporated by reference herein), or through homologous recombination, preferably detected by positive/negative genetic selection strategies (Mansour et al., 1988, Nature 336:348-352; U.S. Pat. Nos. 5,464,764; 5,487,992; 5,627,059; 5,631,153; 5,614,396; 5,616,491; and 5,679,523; all of which are incorporated by reference herein). These organisms with altered gene expression are preferably eukaryotes and more preferably are mammals. Such organisms are useful for the development of non-human models for the study of disorders involving the corresponding gene(s), and for the development of assay systems for the identification of molecules that interact with the protein product(s) of the corresponding gene(s).

[0037] Where the protein of the present invention is membrane-bound (e.g., is a receptor), the present invention also provides for soluble forms of such protein. In such forms part or all of the intracellular and transmembrane domains of the protein are deleted such that the protein is fully secreted from the cell in which it is expressed. The intracellular and transmembrane domains of proteins of the invention can be identified in accordance with known techniques for determination of such domains from sequence information.

[0038] Proteins and protein fragments of the present invention include proteins with amino acid sequence lengths that are at least 25% (more preferably at least 50%, and most preferably at least 75%) of the length of a disclosed protein and have at least 60% sequence identity (more preferably, at least 75% identity; most preferably at least 90% or 95% identity) with that disclosed protein, where sequence identity is determined by comparing the amino acid sequences of the proteins when aligned so as to maximize overlap and identity while minimizing sequence gaps. Also included in the present invention are proteins and protein fragments that contain a segment preferably comprising 8 or more (more preferably 20 or more, most preferably 30 or more) contiguous amino acids that shares at least 75% sequence identity (more preferably, at least 85% identity; most preferably at least 95% identity) with any such segment of any of the disclosed proteins.

[0039] In particular, sequence identity may be determined using WU-BLAST (Washington University BLAST) version 2.0 software, which builds upon WU-BLAST version 1.4, which in turn is based on the public domain NCBI-BLAST version 1.4 (Altschul and Gish, 1996, Local alignment statistics, Doolittle ed., Methods in Enzymology 266:460-480; Altschul et al., 1990, Basic local alignment search tool, Journal of Molecular Biology 215:403-410; Gish and States, 1993, Identification of protein coding regions by database similarity search, Nature Genetics 3: 266-272; Karlin and Altschul, 1993, Applications and statistics for multiple high-scoring segments in molecular sequences, Proc. Natl. Acad. Sci. USA 90:5873-5877; all of which are incorporated by reference herein). WU-BLAST version 2.0 executable programs for several UNIX platforms can be downloaded from the Internet file-transfer protocol (FTP) site ftp://blast.wustl.edu/blast/executables. The complete suite of search programs (BLASTP, BLASTN, BLASTX, TBLASTN, and TBLASTX) is provided at that site, in addition to several support programs. WU-BLAST 2.0 is copyrighted and may not be sold or redistributed in any form or manner without the express written consent of the author; but the posted executables may otherwise be freely used for commercial, nonprofit, or academic purposes. In all search programs in the suite—BLASTP, BLASTN, BLASTX, TBLASTN and TBLASTX—the gapped alignment routines are integral to the database search itself, and thus yield much better sensitivity and selectivity while producing the more easily interpreted output. Gapping can optionally be turned off in all of these programs, if desired. The default penalty (Q) for a gap of length one is Q=9 for proteins and BLASTP, and Q=10 for BLASTN, but may be changed to any integer value including zero, one through eight, nine, ten, eleven, twelve through twenty, twenty-one through fifty, fifty-one through one hundred, etc. The default per-residue penalty for extending a gap (R) is R=2 for proteins and BLASTP, and R=10 for BLASTN, but may be changed to any integer value including zero, one, two, three, four, five, six, seven, eight, nine, ten, eleven, twelve through twenty, twenty-one through fifty, fifty-one through one hundred, etc. Any combination of values for Q and R can be used in order to align sequences so as to maximize overlap and identity while minimizing sequence gaps. The default amino acid comparison matrix is BLOSUM62, but other amino acid comparison matrices such as PAM can be utilized.

[0040] Species homologues of the disclosed polynucleotides and proteins are also provided by the present invention. As used herein, a “species homologue” is a protein or polynucleotide with a different species of origin from that of a given protein or polynucleotide, but with significant sequence similarity to the given protein or polynucleotide. Preferably, polynucleotide species homologues have at least 60% sequence identity (more preferably, at least 75% identity; most preferably at least 90% identity) with the given polynucleotide, and protein species homologues have at least 30% sequence identity (more preferably, at least 45% identity; most preferably at least 60% identity) with the given protein, where sequence identity is determined by comparing the nucleotide sequences of the polynucleotides or the amino acid sequences of the proteins when aligned so as to maximize overlap and identity while minimizing sequence gaps. Species homologues may be isolated and identified by making suitable probes or primers from the sequences provided herein and screening a suitable nucleic acid source from the desired species. Preferably, species homologues are those isolated from mammalian species. Most preferably, species horologues are those isolated from certain mammalian species such as, for example, Pan troglodytes, Gorilla gorilla, Pongo pygmaeus, Hylobates concolor, Macaca mulatta, Papto papto, Papto hamadryas, Cercopithecus aethiops, Cebus capucinus, Aotus trivirgatus, Sanguinus oedipus, Microcebus murinus, Mus musculus, Rattus norvegicus, Cricetulus griseus, Felis catus, Mustela vison, Canis familiaris, Oryctolagus cuniculus, Bos taurus, Ovis aries, Sus scrofa, and Equus caballus, for which genetic maps have been created allowing the identification of syntenic relationships between the genomic organization of genes in one species and the genomic organization of the related genes in another species (O'Brien and Seuánez, 1988, Ann. Rev. Genet. 22:323-351; O'Brien et al., 1993, Nature Genetics 3:103-112; Johansson et al., 1995, Genomics 25:682-690; Lyons et al., 1997, Nature Genetics 15:47-56; O'Brien et al., 1997, Trends in Genetics 13(10):393-399; Carver and Stubbs, 1997, Genome Research 7:1123-1137; all of which are incorporated by reference herein).

[0041] The invention also encompasses allelic variants of the disclosed polynucleotides or proteins; that is, naturally-occurring alternative forms of the isolated polynucleotides which also encode proteins which are identical or have significantly similar sequences to those encoded by the disclosed polynucleotides. Preferably, allelic variants have at least 60% sequence identity (more preferably, at least 75% identity; most preferably at least 90% identity) with the given polynucleotide, where sequence identity is determined by comparing the nucleotide sequences of the polynucleotides when aligned so as to maximize overlap and identity while minimizing sequence gaps. Allelic variants may be isolated and identified by making suitable probes or primers from the sequences provided herein and screening a suitable nucleic acid source from individuals of the appropriate species.

[0042] The invention also includes polynucleotides with sequences complementary to those of the polynucleotides disclosed herein.

[0043] The present invention also includes polynucleotides that hybridize under reduced stringency conditions, more preferably stringent conditions, and most preferably highly stringent conditions, to polynucleotides described herein. Examples of stringency conditions are shown in the table below: highly stringent conditions are those that are at least as stringent as, for example, conditions A-F; stringent conditions are at least as stringent as, for example, conditions G-L; and reduced stringency conditions are at least as stringent as, for example, conditions M-R.

| | Poly- | Hybrid | Hybridization | Wash |
|---|---|---|---|---|
| Stringency | nucleotide | Length | Temperature | Temperature |
| Condition | Hybrid | (bp)^{‡} | and Buffer^{†} | and Buffer^{†} |
| A | DNA:DNA | ≧50 | 65° C.; 1xSSC -or- | 65° C.; |
| | | | 42° C.; 1xSSC, | 0.3xSSC |
| | | | 50% formamide | |
| B | DNA:DNA | <50 | T_{B}*; 1xSSC | T_{B}*; 1xSSC |
| C | DNA:RNA | ≧50 | 67° C.; 1xSSC -or- | 67° C.; |
| | | | 45° C.; 1xSSC, | 0.3xSSC |
| | | | 50% formamide | |
| D | DNA:RNA | <50 | T_{D}*; 1xSSC | T_{D}*; 1xSSC |
| E | RNA:RNA | ≧50 | 70° C.; 1xSSC -or- | 70° C.; |
| | | | 50° C.; 1xSSC, | 0.3xSSC |
| | | | 50% formamide | |
| F | RNA:RNA | <50 | T_{F}*; 1xSSC | T_{F}*; 1xSSC |
| G | DNA:DNA | ≧50 | 65° C.; 4xSSC -or- | 65° C.; |
| | | | 42° C.; 4xSSC, | 1xSSC |
| | | | 50% formamide | |
| H | DNA:DNA | <50 | T_{H}*; 4xSSC | T_{H}*; 4xSSC |
| I | DNA:RNA | ≧50 | 67° C.; 4xSSC -or- | 67° C.; |
| | | | 45° C.; 4xSSC, | 1xSSC |
| | | | 50% formamide | |
| J | DNA:RNA | <50 | T_{J}*; 4xSSC | T_{J}*; 4xSSC |
| K | RNA:RNA | ≧50 | 70° C.; 4xSSC -or- | 67° C.; |
| | | | 50° C.; 4xSSC, | 1xSSC |
| | | | 50% formamide | |
| L | RNA:RNA | <50 | T_{L}*; 2xSSC | T_{L}*; 2xSSC |
| M | DNA:DNA | ≧50 | 50° C.; 4xSSC -or- | 50° C.; |
| | | | 40° C.; 6xSSC, | 2xSSC |
| | | | 50% formamide | |
| N | DNA:DNA | <50 | T_{N}*; 6xSSC | T_{N}*; 6xSSC |
| O | DNA:RNA | ≧50 | 55° C.; 4xSSC -or- | 55° C.; |
| | | | 42° C.; 6xSSC, | 2xSSC |
| | | | 50% formamide | |
| P | DNA:RNA | <50 | T_{P}*; 6xSSC | T_{P}*; 6xSSC |
| Q | RNA:RNA | ≧50 | 60° C.; 4xSSC -or- | 60° C.; |
| | | | 45° C.; 6xSSC, | 2xSSC |
| | | | 50% formamide | |
| R | RNA:RNA | <50 | T_{R}*; 4xSSC | T_{R}*; 4xSSC |

^{‡}The hybrid length is that anticipated for the hybridized region(s) of the hybridizing polynucleotides. When hybridizing a polynucleotide to a target polynucleotide of unknown sequence, the hybrid length is assumed to be that of the hybridizing polynucleotide. When polynucleotides of known sequence are hybridized, the hybrid length can be determined by aligning the sequences of the polynucleotides and identifying the region or regions of optimal sequence complementarity.
^{†}SSPE (1xSSPE is 0.15 M NaCl, 10 mM NaH₂PO₄, and 1.25 mM EDTA, pH 7.4) can be substituted for SSC (1xSSC is 0.15 M NaCl and 15 mM sodium citrate) in the hybridization and wash buffers; washes are performed for 15 minutes after hybridization is complete.

[0044] *T_{B}-T_{R}: The hybridization temperature for hybrids anticipated to be less than 50 base pairs in length should be 5-10° C. less than the melting temperature (Tₘ) of the hybrid, where Tₘ is determined according to the following equations. For hybrids less than 18 base pairs in length, Tₘ(° C.)=2(# of A +T bases)+4(# of G+C bases). For hybrids between 18 and 49 base pairs in length, Tₘ(° C.)=81.5 +16.6(log₁₀[Na⁺])+0.41(%G+C)-(600/N), where N is the number of bases in the hybrid, and [Na⁺] is the concentration of sodium ions in the hybridization buffer ([Na⁺] for 1×SSC=0.165 M).

[0045] Additional examples of stringency conditions for polynucleotide hybridization are provided in Sambrook, J., E. F. Fritsch, and T. Maniatis, 1989, Molecular Cloning: A Laboratory Manual, Cold Spring Harbor Laboratory Press, Cold Spring Harbor, N.Y., chapters 9 and 11, and Current Protocols in Molecular Biology, 1995, F. M. Ausubel et al., eds., John Wiley & Sons, Inc., sections 2.10 and 6.3-6.4, incorporated herein by reference.

[0046] Preferably, each such hybridizing polynucleotide has a length that is at least 25%(more preferably at least 50%, and most preferably at least 75%) of the length of the polynucleotide of the present invention to which it hybridizes, and has at least 60% sequence identity (more preferably, at least 75% identity; most preferably at least 90% or 95% identity) with the polynucleotide of the present invention to which it hybridizes, where sequence identity is determined by comparing the sequences of the hybridizing polynucleotides when aligned so as to maximize overlap and identity while minimizing sequence gaps.

[0047] The isolated polynucleotide of the invention may contain sequences at its 5′ and/or 3′ end that are derived from linker, polylinker, or multiple cloning site sequences commonly found in vectors such as the pMT2 or pED expression vectors (see below). For example, sequences such as SEQ ID NO:626, SEQ ID NO:627, or SEQ ID NO:628 may be found at the 5′ end of an isolated polynucleotide of the invention, or the complement of any of these sequences may be found at its 3′ end. Similarly, sequences such as SEQ ID NO:629, SEQ ID NO:630, or SEQ ID NO:631 may be found at the 3′ end of an isolated polynucleotide of the invention, or the complement of any of these sequences may be found at its 5′ end. In addition, variants of these linker sequences may be present in isolated polynucleotides of the invention, which linker variants vary from SEQ ID NO:626 through SEQ ID NO:631 by the alteration, insertion, or deletion of one or more nucleotides. Therefore, a preferred embodiment of the invention comprises the nucleotide sequence of any of the isolated polynucleotides disclosed herein, beginning at nucleotide 25 and ending at nucleotide (N-25) of the SEQ ID NO for that polynucleotide, where N represents the total number of nucleotides in the sequence. As a specific example, a preferred embodiment of the invention comprises the nucleotide sequence of SEQ ID NO:1 from nucleotide 25 to nucleotide 802, where the total number of nucleotides (N) in SEQ ID NO:1 is 827, and N-25 equals 802. More preferably, a polynucleotide of the invention comprises the nucleotide sequence of any of the isolated polynucleotides disclosed herein, beginning at nucleotide 30 and ending at nucleotide (N-30) of the SEQ ID NO for that polynucleotide. Most preferably, a polynucleotide of the invention comprises the nucleotide sequence of any of the isolated polynucleotides disclosed herein, beginning at nucleotide 35 and ending at nucleotide (N-35) of the SEQ ID NO for that polynucleotide. Similarly, additional embodiments are those nucleotide sequences that extend from nucleotide 40 to nucleotide (N-40), or from nucleotide 45 to nucleotide (N-45), or from nucleotide 50 to nucleotide (N-50), or from nucleotide 60 to nucleotide (N-60), or from nucleotide 65 to nucleotide (N-65), or from nucleotide 70 to nucleotide (N-70), or from nucleotide 75 to nucleotide (N-75), or from nucleotide 80 to nucleotide (N-80), etc., for any of the polynucleotides disclosed herein. Further preferred embodiments are those nucleotide sequences that are subsequences of the nucleotide sequences disclosed herein, beginning at any nucleotide position selected from the group consisting of nucleotide 5, nucleotide 10, nucleotide 15, nucleotide 20, nucleotide 25, nucleotide 30, nucleotide 35, nucleotide 40, nucleotide 45, nucleotide 50, nucleotide 55, nucleotide 60, nucleotide 65, nucleotide 70, nucleotide 75, or nucleotide 80, and ending at any nucleotide position selected from the group consisting of nucleotide (N-5), nucleotide (N-10), nucleotide (N-15), nucleotide (N-20), nucleotide (N-25), nucleotide (N-30), nucleotide (N-35), nucleotide (N-40), nucleotide (N-45), nucleotide (N-50), nucleotide (N-55), nucleotide (N-60), nucleotide (N-65), nucleotide (N-70), nucleotide (N-75), or nucleotide (N-80), wherein N is the total number of nucleotides disclosed for a particular SEQ ID NO.

[0048] The isolated polynucleotide of the invention may be operably linked to an expression control sequence such as the pMT2 or pED expression vectors disclosed in Kaufman et al., Nucleic Acids Res. 19,4485-4490 (1991), in order to produce the protein recombinantly. Many suitable expression control sequences are known in the art. General methods of expressing recombinant proteins are also known and are exemplified in R. Kaufman, Methods in Enzymology 185,537-566 (1990). As defined herein “operably linked” means that the isolated polynucleotide of the invention and an expression control sequence are situated within a vector or cell in such a way that the protein is expressed by a host cell which has been transformed (transfected) with the ligated polynucleotide/expression control sequence.

[0049] A number of types of cells may act as suitable host cells for expression of the protein. Mammalian host cells include, for example, monkey COS cells, Chinese Hamster Ovary (CHO) cells, human kidney 293 cells, human epidermal A431 cells, human Colo205 cells, 3T3 cells, CV-1 cells, other transformed primate cell lines, normal diploid cells, cell strains derived from in vitro culture of primary tissue, primary explants, HeLa cells, mouse L cells, BHK, HL-60, U937, HaK or Jurkat cells.

[0050] Alternatively, it may be possible to produce the protein in lower eukaryotes such as yeast or in prokaryotes such as bacteria. Potentially suitable yeast strains include Saccharomyces cerevisiae, Schizosaccharomyces pombe, Kluyveromyces strains, Candida, or any yeast strain capable of expressing heterologous proteins. Potentially suitable bacterial strains include Escherichia coli, Bacillus subtilis, Salmonella typhimurium, or any bacterial strain capable of expressing heterologous proteins. If the protein is made in yeast or bacteria, it may be necessary to modify the protein produced therein, for example by phosphorylation or glycosylation of the appropriate sites, in order to obtain the functional protein. Such covalent attachments may be accomplished using known chemical or enzymatic methods.

[0051] The protein may also be produced by operably linking the isolated polynucleotide of the invention to suitable control sequences in one or more insect expression vectors, and employing an insect expression system. Materials and methods for baculovirus/insect cell expression systems are commercially available in kit form from, e.g., Invitrogen, San Diego, Calif., U.S.A. (the MaxBac® kit), and such methods are well known in the art, as described in Summers and Smith, Texas Agricultural Experiment Station Bulletin No. 1555 (1987), incorporated herein by reference. As used herein, an insect cell capable of expressing a polynucleotide of the present invention is “transformed.”

[0052] The protein of the invention may be prepared by culturing transformed host cells under culture conditions suitable to express the recombinant protein. The resulting expressed protein may then be purified from such culture (i.e., from culture medium or cell extracts) using known purification processes, such as gel filtration and ion exchange chromatography. The purification of the protein may also include an affinity column containing agents which will bind to the protein; one or more column steps over such affinity resins as concanavalin A-agarose, heparin-toyopearl® or Cibacrom blue 3GA Sepharose®; one or more steps involving hydrophobic interaction chromatography using such resins as phenyl ether, butyl ether, or propyl ether; or immunoaffinity chromatography.

[0053] Alternatively, the protein of the invention may also be expressed in a form which will facilitate purification. For example, it may be expressed as a fusion protein, such as those of maltose binding protein (MBP), glutathione-S-transferase (GST) or thioredoxin (TRX). Kits for expression and purification of such fusion proteins are commercially available from New England BioLabs (Beverly, Mass.), Pharmacia (Piscataway, N.J.) and Invitrogen Corporation (Carlsbad, Calif.), respectively. The protein can also be tagged with an epitope and subsequently purified by using a specific antibody directed to such epitope. One such epitope (“Flag”) is commercially available from the Eastman Kodak Company (New Haven, Conn.).

[0054] Finally, one or more reverse-phase high performance liquid chromatography (RP-HPLC) steps employing hydrophobic RP-HPLC media, e.g., silica gel having pendant methyl or other aliphatic groups, can be employed to further purify the protein. Some or all of the foregoing purification steps, in various combinations, can also be employed to provide a substantially homogeneous isolated recombinant protein. The protein thus purified is substantially free of other mammalian proteins and is defined in accordance with the present invention as an “isolated protein.”

[0055] The protein of the invention may also be expressed as a product of transgenic animals, e.g., as a component of the milk of transgenic cows, goats, pigs, or sheep which are characterized by somatic or germ cells containing a nucleotide sequence encoding the protein.

[0056] The protein may also be produced by known conventional chemical synthesis. Methods for constructing the proteins of the present invention by synthetic means are known to those skilled in the art. The synthetically-constructed protein sequences, by virtue of sharing primary, secondary or tertiary structural and/or conformational characteristics with proteins may possess biological properties in common therewith, including protein activity. Thus, they may be employed as biologically active or immunological substitutes for natural, purified proteins in screening of therapeutic compounds and in immunological processes for the development of antibodies.

[0057] The proteins provided herein also include proteins characterized by amino acid sequences similar to those of purified proteins but into which modification are naturally provided or deliberately engineered. For example, modifications in the peptide or DNA sequences can be made by those skilled in the art using known techniques. Modifications of interest in the protein sequences may include the alteration, substitution, replacement, insertion or deletion of a selected amino acid residue in the coding sequence. For example, one or more of the cysteine residues may be deleted or replaced with another amino acid to alter the conformation of the molecule. Techniques for such alteration, substitution, replacement, insertion or deletion are well known to those skilled in the art (see, e.g., U.S. Pat. No. 4,518,584). Preferably, such alteration, substitution, replacement, insertion or deletion retains the desired activity of the protein.

[0058] Other fragments and derivatives of the sequences of proteins which would be expected to retain protein activity in whole or in part and may thus be useful for screening or other immunological methodologies may also be easily made by those skilled in the art given the disclosures herein. Such modifications are believed to be encompassed by the present invention.

### USES AND BIOLOGICAL ACTIVITY

[0059] The polynucleotides and proteins of the present invention are expected to exhibit one or more of the uses or biological activities (including those associated with assays cited herein) identified below. Uses or activities described for proteins of the present invention may be provided by administration or use of such proteins or by administration or use of polynucleotides encoding such proteins (such as, for example, in gene therapies or vectors suitable for introduction of DNA).

[0060] Research Uses and Utilities

[0061] The polynucleotides provided by the present invention can be used by the research community for various purposes. The primary use of polynucleotides of the invention which are sESTs is as porbes for the identification and isolation of full-length cDNAs and genomic DNA molecules which correspond (i.e., is a longer polynucleotide sequence of which substantially the entire sEST is a fragment in the case of a full-length cDNA, or which encodes the sEST in the case of a genomic DNA molecule) to such sESTs. Techniques for use of such sequences as probes for larger cDNAs or genomic molecules are well known in the art.

[0062] The polynucleotides can also be used to express recombinant protein for analysis, characterization or therapeutic use; as markers for tissues in which the corresponding protein is preferentially expressed (either constitutively or at a particular stage of tissue differentiation or development or in disease states); as molecular weight markers on Southern gels; as chromosome markers or tags (when labeled) to identify chromosomes or to map related gene positions; to compare with endogenous DNA sequences in patients to identify potential genetic disorders; as probes to hybridize and thus discover novel, related DNA sequences; as a source of information to derive PCR primers for genetic fingerprinting; as a probe to “subtract-out” known sequences in the process of discovering other novel polynucleotides; for selecting and making oligomers for attachment to a “gene chip” or other support, including for examination of expression patterns; to raise anti-protein antibodies using DNA immunization techniques; and as an antigen to raise anti-DNA antibodies or elicit another immune response. Where the polynucleotide encodes a protein which binds or potentially binds to another protein (such as, for example, in a receptor-ligand interaction), the polynucleotide can also be used in interaction trap assays (such as, for example, that described in Gyuris et al., Cell 75:791-803 (1993)) to identify polynucleotides encoding the other protein with which binding occurs or to identify inhibitors of the binding interaction.

[0063] The proteins provided by the present invention can similarly be used in assay to determine biological activity, including in a panel of multiple proteins for high-throughput screening; to raise antibodies or to elicit another immune response; as a reagent (including the labeled reagent) in assays designed to quantitatively determine levels of the protein (or its receptor) in biological fluids; as markers for tissues in which the corresponding protein is preferentially expressed (either constitutively or at a particular stage of tissue differentiation or development or in a disease state); and, of course, to isolate correlative receptors or ligands. Where the protein binds or potentially binds to another protein (such as, for example, in a receptor-ligand interaction), the protein can be used to identify the other protein with which binding occurs or to identify inhibitors of the binding interaction. Proteins involved in these binding interactions can also be used to screen for peptide or small molecule inhibitors or agonists of the binding interaction.

[0064] Any or all of these research utilities are capable of being developed into reagent grade or kit format for commercialization as research products.

[0065] Methods for performing the uses listed above are well known to those skilled in the art. References disclosing such methods include without limitation “Molecular Cloning: A Laboratory Manual” , 2d ed., Cold Spring Harbor Laboratory Press, Sambrook, J., E. F. Fritsch and T. Maniatis eds., 1989, and “Methods in Enzymology: Guide to Molecular Cloning Techniques”, Academic Press, Berger, S. L. and A. R. Kimmel eds., 1987.

[0066] Nutritional Uses

[0067] Polynucleotides and proteins of the present invention can also be used as nutritional sources or supplements. Such uses include without limitation use as a protein or amino acid supplement, use as a carbon source, use as a nitrogen source and use as a source of carbohydrate. In such cases the protein or polynucleotide of the invention can be added to the feed of a particular organism or can be administered as a separate solid or liquid preparation, such as in the form of powder, pills, solutions, suspensions or capsules. In the case of microorganisms, the protein or polynucleotide of the invention can be added to the medium in or on which the microorganism is cultured.

[0068] Cytokine and Cell Proliferation/Differentiation Activity

[0069] A protein of the present invention may exhibit cytokine, cell proliferation (either inducing or inhibiting) or cell differentiation (either inducing or inhibiting) activity or may induce production of other cytokines in certain cell populations. Many protein factors discovered to date, including all known cytokines, have exhibited activity in one or more factor dependent cell proliferation assays, and hence the assays serve as a convenient confirmation of cytokine activity. The activity of a protein of the present invention is evidenced by any one of a number of routine factor dependent cell proliferation assays for cell lines including, without limitation, 32D, DA2, DA1G, T10, B9, B9/11, BaF3, MC9/G, M+(preB M+), 2E8, RB5, DA1, 123, T1165, HT2, CTLL2, TF-1, Mo7e and CMK.

[0070] The activity of a protein of the invention may, among other means, be measured by the following methods:

[0071] Assays for T-cell or thymocyte proliferation include without limitation those described in: Current Protocols in Immunology, Ed by J. E. Coligan, A. M. Kruisbeek, D. H. Margulies, E. M. Shevach, W Strober, Pub. Greene Publishing Associates and Wiley-Interscience (Chapter 3, In Vitro assays for Mouse Lymphocyte Function 3.1-3.19; Chapter 7, Immunologic studies in Humans); Takai et al., J. Immunol. 137:3494-3500, 1986; Bertagnolli et al., J. Immunol. 145:1706-1712, 1990; Bertagnolli et al., Cellular Immunology 133:327-341, 1991; Bertagnolli, et al., J. Immunol. 149:3778-3783, 1992; Bowman et al., J. Immunol. 152: 1756-1761, 1994.

[0072] Assays for cytokine production and/or proliferation of spleen cells, lymph node cells or thymocytes include, without limitation, those described in: Polyclonal T cell stimulation, Kruisbeek, A. M. and Shevach, E. M. In Current Protocols in Immunology. J. E. e.a. Coligan eds. Vol 1 pp. 3.12.1-3.12.14, John Wiley and Sons, Toronto. 1994; and Measurement of mouse and human Interferon 7, Schreiber, R. D. In Current Protocols in Immunology. J. E.e.a. Coligan eds. Vol 1 pp. 6.8.1-6.8.8, John Wiley and Sons, Toronto. 1994.

[0073] Assays for proliferation and differentiation of hematopoietic and lymphopoietic cells include, without limitation, those described in: Measurement of Human and Murine Interleukin 2 and Interleukin 4, Bottomly, K., Davis, L. S. and Lipsky, P. E. In Current Protocols in Immunology. J. E.e.a. Coligan eds. Vol 1 pp. 6.3.1-6.3.12, John Wiley and Sons, Toronto. 1991; deVries et al., J. Exp. Med. 173:1205-1211, 1991; Moreau et al., Nature 336:690-692, 1988; Greenberger et al., Proc. Natl. Acad. Sci. U.S.A. 80:2931-2938, 1983; Measurement of mouse and human interleukin 6—Nordan, R. In Current Protocols in Immunology. J. E.e.a. Coligan eds. Vol 1 pp. 6.6.1-6.6.5, John Wiley and Sorts, Toronto. 1991; Smith et al., Proc. Natl. Acad. Sci. U.S.A. 83:1857-1861, 1986; Measurement of human Interleukin 11 —Bennett, F., Giannotti, J., Clark, S.C. and Turner, K. J. In Current Protocols in Immunology. J. E.e.a. Coligan eds. Vol 1 pp. 6.15.1 John Wiley and Sons, Toronto. 1991; Measurement of mouse and human Interleukin 9 —Ciarletta, A., Giannotti, J., Clark, S. C. and Turner, K. J. In Current Protocols in Immunology. J. E.e.a. Coligan eds. Vol 1 pp. 6.13.1, John Wiley and Sons, Toronto. 1991.

[0074] Assays for T-cell clone responses to antigens (which will identify, among others, proteins that affect APC-T cell interactions as well as direct T-cell effects by measuring proliferation and cytokine production) include, without limitation, those described in: Current Protocols in Immunology, Ed by J. E. Coligan, A. M. Kruisbeek, D. H. Margulies, E. M. Shevach, W Strober, Pub. Greene Publishing Associates and Wiley-Interscience (Chapter 3, In Vitro assays for Mouse Lymphocyte Function; Chapter 6, Cytokines and their cellular receptors; Chapter 7, Immunologic studies in Humans); Weinberger et al., Proc. Natl. Acad. Sci. USA 77:6091-6095, 1980; Weinberger et al., Eur. J. Immun. 11:405411, 1981; Takai et al., J. Immunol. 137:3494-3500, 1986; Takai et al., J. Immunol. 140:508-512, 1988.

[0075] Immune Stimulating or Suppressing Activity

[0076] A protein of the present invention may also exhibit immune stimulating or immune suppressing activity, including without limitation the activities for which assays are described herein. A protein may be useful in the treatment of various immune deficiencies and disorders (including severe combined immunodeficiency (SCID)), e.g., in regulating (up or down) growth and proliferation of T and/or B lymphocytes, as well as effecting the cytolytic activity of NK cells and other cell populations. These immune deficiencies may be genetic or be caused by viral (e.g., HIV) as well as bacterial or fungal infections, or may result from autoimmune disorders. More specifically, infectious diseases causes by viral, bacterial, fungal or other infection may be treatable using a protein of the present invention, including infections by HIV, hepatitis viruses, herpesviruses, mycobacteria, Leishmania spp., malaria spp. and various fungal infections such as candidiasis. Of course, in this regard, a protein of the present invention may also be useful where a boost to the immune system generally may be desirable, i.e., in the treatment of cancer.

[0077] Autoimmune disorders which may be treated using a protein of the present invention include, for example, connective tissue disease, multiple sclerosis, systemic lupus erythematosus, rheumatoid arthritis, autoimmune pulmonary inflammation, Guillain-Barre syndrome, autoimmune thyroiditis, insulin dependent diabetes mellitis, myasthenia gravis, graft-versus-host disease and autoimmune inflammatory eye disease. Such a protein of the present invention may also to be useful in the treatment of allergic reactions and conditions, such as asthma (particularly allergic asthma) or other respiratory problems. Other conditions, in which immune suppression is desired (including, for example, organ transplantation), may also be treatable using a protein of the present invention.

[0078] Using the proteins of the invention it may also be possible to immune responses, in a number of ways. Down regulation may be in the form of inhibiting or blocking an immune response already in progress or may involve preventing the induction of an immune response. The functions of activated T cells may be inhibited by suppressing T cell responses or by inducing specific tolerance in T cells, or both. Immunosuppression of T cell responses is generally an active, non-antigen-specific, process which requires continuous exposure of the T cells to the suppressive agent. Tolerance, which involves inducing non-responsiveness or anergy in T cells, is distinguishable from immunosuppression in that it is generally antigen-specific and persists after exposure to the tolerizing agent has ceased. Operationally, tolerance can be demonstrated by the lack of a T cell response upon reexposure to specific antigen in the absence of the tolerizing agent.

[0079] Down regulating or preventing one or more antigen functions (including without limitation B lymphocyte antigen functions (such as, for example, B7)), e.g., preventing high level lymphokine synthesis by activated T cells, will be useful in situations of tissue, skin and organ transplantation and in graft-versus-host disease (GVHD). For example, blockage of T cell function should result in reduced tissue destruction in tissue transplantation. Typically, in tissue transplants, rejection of the transplant is initiated through its recognition as foreign by T cells, followed by an immune reaction that destroys the transplant. The administration of a molecule which inhibits or blocks interaction of a B7 lymphocyte antigen with its natural ligand(s) on immune cells (such as a soluble, monomeric form of a peptide having B7-2 activity alone or in conjunction with a monomeric form of a peptide having an activity of another B lymphocyte antigen (e.g., B7-1, B7-3) or blocking antibody), prior to transplantation can lead to the binding of the molecule to the natural ligand(s) on the immune cells without transmitting the corresponding costimulatory signal. Blocking B lymphocyte antigen function in this matter prevents cytokine synthesis by immune cells, such as T cells, and thus acts as an immunosuppressant. Moreover, the lack of costimulation may also be sufficient to anergize the T cells, thereby inducing tolerance in a subject. Induction of long-term tolerance by B lymphocyte antigen-blocking reagents may avoid the necessity of repeated administration of these blocking reagents. To achieve sufficient immunosuppression or tolerance in a subject, it may also be necessary to block the function of a combination of B lymphocyte antigens.

[0080] The efficacy of particular blocking reagents in preventing organ transplant rejection or GVHD can be assessed using animal models that are predictive of efficacy in humans. Examples of appropriate systems which can be used include allogeneic cardiac grafts in rats and xenogeneic pancreatic islet cell grafts in mice, both of which have been used to examine the immunosuppressive effects of CTLA4Ig fusion proteins in vivo as described in Lenschow et al., Science 257:789-792 (1992) and Turka et al., Proc. Natl. Acad. Sci USA, 89:11102-11105 (1992). In addition, murine models of GVHD (see Paul ed., Fundamental Immunology, Raven Press, New York, 1989, pp. 846-847) can be used to determine the effect of blocking B lymphocyte antigen function in vivo on the development of that disease.

[0081] Blocking antigen function may also be therapeutically useful for treating autoimmune diseases. Many autoimmune disorders are the result of inappropriate activation of T cells that are reactive against self tissue and which promote the production of cytokines and autoantibodies involved in the pathology of the diseases. Preventing the activation of autoreactive T cells may reduce or eliminate disease symptoms. Administration of reagents which block costimulation of T cells by disrupting receptor:ligand interactions of B lymphocyte antigens can be used to inhibit T cell activation and prevent production of autoantibodies or T cell-derived cytokines which may be involved in the disease process. Additionally, blocking reagents may induce antigen-specific tolerance of autoreactive T cells which could lead to long-term relief from the disease. The efficacy of blocking reagents in preventing or alleviating autoimmune disorders can be determined using a number of well-characterized animal models of human autoimmune diseases. Examples include murine experimental autoimmune encephalitis, systemic lupus erythmatosis in MRL/lpr/lpr mice or NZB hybrid mice, murine autoimmune collagen arthritis, diabetes mellitus in NOD mice and BB rats, and murine experimental myasthenia gravis (see Paul ed., Fundamental Immunology, Raven Press, New York, 1989, pp. 840-856).

[0082] Upregulation of an antigen function (preferably a B lymphocyte antigen function), as a means of up regulating immune responses, may also be useful in therapy. Upregulation of immune responses may be in the form of enhancing an existing immune response or eliciting an initial immune response. For example, enhancing an immune response through stimulating B lymphocyte antigen function may be useful in cases of viral infection. In addition, systemic viral diseases such as influenza, the common cold, and encephalitis might be alleviated by the administration of stimulatory forms of B lymphocyte antigens systemically.

[0083] Alternatively, anti-viral immune responses may be enhanced in an infected patient by removing T cells from the patient, costimulating the T cells in vitro with viral antigen-pulsed APCs either expressing a peptide of the present invention or together with a stimulatory form of a soluble peptide of the present invention and reintroducing the in vitro activated T cells into the patient. Another method of enhancing anti-viral immune responses would be to isolate infected cells from a patient, transfect them with a nucleic acid encoding a protein of the present invention as described herein such that the cells express all or a portion of the protein on their surface, and reintroduce the transfected cells into the patient. The infected cells would now be capable of delivering a costimulatory signal to, and thereby activate, T cells in vivo.

[0084] In another application, up regulation or enhancement of antigen function (preferably B lymphocyte antigen function) may be useful in the induction of tumor immunity. Tumor cells (e.g., sarcoma, melanoma, lymphoma, leukemia, neuroblastoma, carcinoma) transfected with a nucleic acid encoding at least one peptide of the present invention can be administered to a subject to overcome tumor-specific tolerance in the subject. If desired, the tumor cell can be transfected to express a combination of peptides. For example, tumor cells obtained from a patient can be transfected ex vivo with an expression vector directing the expression of a peptide having B7-2-like activity alone, or in conjunction with a peptide having B7-1-like activity and/or B7-3-like activity. The transfected tumor cells are returned to the patient to result in expression of the peptides on the surface of the transfected cell. Alternatively, gene therapy techniques can be used to target a tumor cell for transfection in vivo.

[0085] The presence of the peptide of the present invention having the activity of a B lymphocyte antigen(s) on the surface of the tumor cell provides the necessary costimulation signal to T cells to induce a T cell mediated immune response against the transfected tumor cells. In addition, tumor cells which lack MHC class I or MHC class II molecules, or which fail to reexpress sufficient amounts of MHC class I or MHC class II molecules, can be transfected with nucleic acid encoding all or a portion of (e.g., a cytoplasmic-domain truncated portion) of an MHC class I α chain protein and β₂ microglobulin protein or an MHC class II α chain protein and an MHC class II β chain protein to thereby express MHC class I or MHC class II proteins on the cell surface. Expression of the appropriate class I or class II MHC in conjunction with a peptide having the activity of a B lymphocyte antigen (e.g., B7-1, B7-2, B7-3) induces a T cell mediated immune response against the transfected tumor cell. Optionally, a gene encoding an antisense construct which blocks expression of an MHC class II associated protein, such as the invariant chain, can also be cotransfected with a DNA encoding a peptide having the activity of a B lymphocyte antigen to promote presentation of tumor associated antigens and induce tumor specific immunity. Thus, the induction of a T cell mediated immune response in a human subject may be sufficient to overcome tumor-specific tolerance in the subject.

[0086] The activity of a protein of the invention may, among other means, be measured by the following methods:

[0087] Suitable assays for thymocyte or splenocyte cytotoxicity include, without limitation, those described in: Current Protocols in Immunology, Ed by J. E. Coligan, A. M. Kruisbeek, D. H. Margulies, E. M. Shevach, W Strober, Pub. Greene Publishing Associates and Wiley-Interscience (Chapter 3, In Vitro assays for Mouse Lymphocyte Function 3.1-3.19; Chapter 7, Immunologic studies in Humans); Herrmann et al., Proc. Natl. Acad. Sci. USA 78:2488-2492, 1981; Herrmann et al., J. Immunol. 128:1968-1974, 1982; Handa et al., J. Immunol. 135:1564-1572, 1985; Takai et al., J. Immunol. 137:3494-3500, 1986; Takai et al., J. Immunol. 140:508-512, 1988; Herrmann et al., Proc. Natl. Acad. Sci. USA 78:2488-2492, 1981; Herrmann et al., J. Immnunol. 128:1968-1974, 1982; Handa et al., J. Immunol. 135:1564-1572, 1985; Takai et al., J. Immunol. 137:3494-3500, 1986; Bowmanet al., J. Virology 61:1992-1998; Takai et al., J. Immunol. 140:508-512, 1988; Bertagnolli et al., Cellular Immunology 133:327-341, 1991; Brown et al., J. Immunol. 153:3079-3092, 1994.

[0088] Assays for T-cell-dependent immunoglobulin responses and isotype switching (which will identify, among others, proteins that modulate T-cell dependent antibody responses and that affect Th1/Th2 profiles) include, without limitation, those described in: Maliszewski, J. Immunol. 144:3028-3033, 1990; and Assays for B cell function: In vitro antibody production, Mond, J. J. and Brunswick, M. In Current Protocols in Immunology. J. E.e.a. Coligan eds. Vol 1 pp. 3.8.1-3.8.16, John Wiley and Sons, Toronto. 1994.

[0089] Mixed lymphocyte reaction (MLR) assays (which will identify, among others, proteins that generate predominantly Th1 and CTL responses) include, without limitation, those described in: Current Protocols in Immunology, Ed by J. E. Coligan, A. M. Kruisbeek, D. H. Margulies, E. M. Shevach, W Strober, Pub. Greene Publishing Associates and Wiley-Interscience (Chapter 3, In Vitro assays for Mouse Lymphocyte Function 3.1-3.19; Chapter 7, Immunologic studies in Humans); Takai et al., J. Immunol. 137:3494-3500, 1986; Takai et al., J. Immunol. 140:508-512, 1988; Bertagnolli et al., J. Immunol. 149:3778-3783, 1992.

[0090] Dendritic cell-dependent assays (which will identify, among others, proteins expressed by dendritic cells that activate naive T-cells) include, without limitation, those described in: Guery et al., J. Immunol. 134:536-544, 1995; Inaba et al., Journal of Experimental Medicine 173:549-559, 1991; Macatonia et al., Journal of Immunology 154:5071-5079, 1995; Porgador et al., Journal of Experimental Medicine 182:255-260, 1995; Nair et al., Journal of Virology 67:4062-4069, 1993; Huang et al., Science 264:961-965, 1994; Macatonia et al., Journal of Experimental Medicine 169:1255-1264, 1989; Bhardwaj et al., Journal of Clinical Investigation 94:797-807, 1994; and Inaba et al., Journal of Experimental Medicine 172:631-640, 1990.

[0091] Assays for lymphocyte survival/apoptosis (which will identify, among others, proteins that prevent apoptosis after superantigen induction and proteins that regulate lymphocyte homeostasis) include, without limitation, those described in: Darzynkiewicz et al., Cytometry 13:795-808, 1992; Gorczyca et al., Leukemia 7:659-670, 1993; Gorczyca et al., Cancer Research 53:1945-1951, 1993; Itoh et al., Cell 66:233-243, 1991; Zacharchuk, Journal of Immunology 145:4037-4045, 1990; Zamai et al., Cytometry 14:891-897, 1993; Gorczyca et al., International Journal of Oncology 1:639-648, 1992.

[0092] Assays for proteins that influence early steps of T-cell commitment and development include, without limitation, those described in: Antica et al., Blood 84:111-117, 1994; Fine et al., Cellular Immunology 155:111-122, 1994; Galy et al., Blood 85:2770-2778, 1995; Toki et al., Proc. Nat. Acad Sci. USA 88:7548-7551, 1991.

[0093] Hematopoiesis Regulating Activity

[0094] A protein of the present invention may be useful in regulation of hematopoiesis and, consequently, in the treatment of myeloid or lymphoid cell deficiencies. Even marginal biological activity in support of colony forming cells or of factor-dependent cell lines indicates involvement in regulating hematopoiesis, e.g. in supporting the growth and proliferation of erythroid progenitor cells alone or in combination with other cytokines, thereby indicating utility, for example, in treating various anemias or for use in conjunction with irradiation/chemotherapy to stimulate the production of erythroid precursors and/or erythroid cells; in supporting the growth and proliferation of myeloid cells such as granulocytes and monocytes/macrophages (i.e., traditional CSF activity) useful, for example, in conjunction with chemotherapy to prevent or treat consequent myelo-suppression; in supporting the growth and proliferation of megakaryocytes and consequently of platelets thereby allowing prevention or treatment of various platelet disorders such as thrombocytopenia, and generally for use in place of or complimentary to platelet transfusions; and/or in supporting the growth and proliferation of hematopoietic stem cells which are capable of maturing to any and all of the above-mentioned hematopoietic cells and therefore find therapeutic utility in various stem cell disorders (such as those usually treated with transplantation, including, without limitation, aplastic anemia and paroxysmal nocturnal hemoglobinuria), as well as in repopulating the stem cell compartment post irradiation/chemotherapy, either in-vivo or ex-vivo (i.e., in conjunction with bone marrow transplantation or with peripheral progenitor cell transplantation (homologous or heterologous)) as normal cells or genetically manipulated for gene therapy.

[0095] The activity of a protein of the invention may, among other means, be measured by the following methods:

[0096] Suitable assays for proliferation and differentiation of various hematopoietic lines are cited above.

[0097] Assays for embryonic stem cell differentiation (which will identify, among others, proteins that influence embryonic differentiation hematopoiesis) include, without limitation, those described in: Johansson et al. Cellular Biology 15:141-151, 1995; Keller et al., Molecular and Cellular Biology 13:473-486, 1993; McClanahan et al., Blood 81:2903-2915, 1993.

[0098] Assays for stem cell survival and differentiation (which will identify, among others, proteins that regulate lympho-hematopoiesis) include, without limitation, those described in: Methylcellulose colony forming assays, Freshney, M. G. In Culture of Hematopoietic Cells. R. I. Freshney, et al. eds. Vol pp. 265-268, Wiley-Liss, Inc., New York, N.Y. 1994; Hirayama et al., Proc. Natl. Acad. Sci. USA 89:5907-5911, 1992; Primitive hematopoietic colony forming cells with high proliferative potential, McNiece, I. K. and Briddell, R. A. In Culture of Hematopoietic Cells. R. I. Freshney, et al. eds. Vol pp. 23-39, Wiley-Liss, Inc., New York, N.Y. 1994; Neben et al., Experimental Hematology 22:353-359, 1994; Cobblestone area forming cell assay, Ploemacher, R. E. In Culture of Hematopoietic Cells. R. I. Freshney, et al. eds. Vol pp. 1-21, Wiley-Liss, Inc.., New York, N.Y. 1994; Long term bone marrow cultures in the presence of stromal cells, Spooncer, E., Dexter, M. and Allen, T. In Culture of Hematopoietic Cells. R. I. Freshney, et al. eds. Vol pp. 163-179, Wiley-Liss, Inc., New York, N.Y. 1994; Long term culture initiating cell assay, Sutherland, H. J. In Culture of Hematopoietic Cells. R. I. Freshney, et al. eds. Vol pp. 139-162, Wiley-Liss, Inc., New York, N.Y. 1994.

[0099] Tissue Growth Activity

[0100] A protein of the present invention also may have utility in compositions used for bone, cartilage, tendon, ligament and/or nerve tissue growth or regeneration, as well as for wound healing and tissue repair and replacement, and in the treatment of burns, incisions and ulcers.

[0101] A protein of the present invention, which induces cartilage and/or bone growth in circumstances where bone is not normally formed, has application in the healing of bone fractures and cartilage damage or defects in humans and other animals. Such a preparation employing a protein of the invention may have prophylactic use in closed as well as open fracture reduction and also in the improved fixation of artificial joints. De novo bone formation induced by an osteogenic agent contributes to the repair of congenital, trauma induced, or oncologic resection induced craniofacial defects, and also is useful in cosmetic plastic surgery.

[0102] A protein of this invention may also be used in the treatment of periodontal disease, and in other tooth repair processes. Such agents may provide an environment to attract bone-forming cells, stimulate growth of bone-forming cells or induce differentiation of progenitors of bone-forming cells. A protein of the invention may also be useful in the treatment of osteoporosis or osteoarthritis, such as through stimulation of bone and/or cartilage repair or by blocking inflammation or processes of tissue destruction (collagenase activity, osteoclast activity, etc.) mediated by inflammatory processes.

[0103] Another category of tissue regeneration activity that may be attributable to the protein of the present invention is tendon/ligament formation. A protein of the present invention, which induces tendon/ligament-like tissue or other tissue formation in circumstances where such tissue is not normally formed, has application in the healing of tendon or ligament tears, deformities and other tendon or ligament defects in humans and other animals. Such a preparation employing a tendon/ligament-like tissue inducing protein may have prophylactic use in preventing damage to tendon or ligament tissue, as well as use in the improved fixation of tendon or ligament to bone or other tissues, and in repairing defects to tendon or ligament tissue. De novo tendon/ligament-like tissue formation induced by a composition of the present invention contributes to the repair of congenital, trauma induced, or other tendon or ligament defects of other origin, and is also useful in cosmetic plastic surgery for attachment or repair of tendons or ligaments. The compositions of the present invention may provide an environment to attract tendon- or ligament-forming cells, stimulate growth of tendon- or ligament-forming cells, induce differentiation of progenitors of tendon- or ligament-forming cells, or induce growth of tendon/ligament cells or progenitors ex vivo for return in vivo to effect tissue repair. The compositions of the invention may also be useful in the treatment of tendinitis, carpal tunnel syndrome and other tendon or ligament defects. The compositions may also include an appropriate matrix and/or sequestering agent as a carrier as is well known in the art.

[0104] The protein of the present invention may also be useful for proliferation of neural cells and for regeneration of nerve and brain tissue, i.e. for the treatment of central and peripheral nervous system diseases and neuropathies, as well as mechanical and traumatic disorders, which involve degeneration, death or trauma to neural cells or nerve tissue. More specifically, a protein may be used in the treatment of diseases of the peripheral nervous system, such as peripheral nerve injuries, peripheral neuropathy and localized neuropathies, and central nervous system diseases, such as Alzheimer's, Parkinson's disease, Huntington's disease, amyotrophic lateral sclerosis, and Shy-Drager syndrome. Further conditions which may be treated in accordance with the present invention include mechanical and traumatic disorders, such as spinal cord disorders, head trauma and cerebrovascular diseases such as stroke. Peripheral neuropathies resulting from chemotherapy or other medical therapies may also be treatable using a protein of the invention.

[0105] Proteins of the invention may also be useful to promote better or faster closure of non-healing wounds, including without limitation pressure ulcers, ulcers associated with vascular insufficiency, surgical and traumatic wounds, and the like.

[0106] It is expected that a protein of the present invention may also exhibit activity for generation or regeneration of other tissues, such as organs (including, for example, pancreas, liver, intestine, kidney, skin, endothelium), muscle (smooth, skeletal or cardiac) and vascular (including vascular endothelium) tissue, or for promoting the growth of cells comprising such tissues. Part of the desired effects may be by inhibition or modulation of fibrotic scarring to allow normal tissue to regenerate. A protein of the invention may also exhibit angiogenic activity.

[0107] A protein of the present invention may also be useful for gut protection or regeneration and treatment of lung or liver fibrosis, reperfusion injury in various tissues, and conditions resulting from systemic cytokine damage.

[0108] A protein of the present invention may also be useful for promoting or inhibiting differentiation of tissues described above from precursor tissues or cells; or for inhibiting the growth of tissues described above.

[0109] The activity of a protein of the invention may, among other means, be measured by the following methods:

[0110] Assays for tissue generation activity include, without limitation, those described in: International Patent Publication No. WO95/16035 (bone, cartilage, tendon); International Patent Publication No. WO95/05846 (nerve, neuronal); International Patent Publication No. WO91/07491 (skin, endothelium).

[0111] Assays for wound healing activity include, without limitation, those described in: Winter, Epidermal Wound Healing, pps. 71-112 (Maibach, H I and Rovee, D T, eds.), Year Book Medical Publishers, Inc., Chicago, as modified by Eaglstein and Mertz, J. Invest. Dermatol 71:382-84 (1978).

[0112] Activin/Inhibin Activity

[0113] A protein of the present invention may also exhibit activin- or inhibin-related activities. Inhibins are characterized by their ability to inhibit the release of follicle stimulating hormone (FSH), while activins and are characterized by their ability to stimulate the release of follicle stimulating hormone (FSH). Thus, a protein of the present invention, alone or in heterodimers with a member of the inhibin α family, may be useful as a contraceptive based on the ability of inhibins to decrease fertility in female mammals and decrease spermatogenesis in male mammals. Administration of sufficient amounts of other inhibins can induce infertility in these mammals. Alternatively, the protein of the invention, as a homodimer or as a heterodimer with other protein subunits of the inhibin-β group, may be useful as a fertility inducing therapeutic, based upon the ability of activin molecules in stimulating FSH release from cells of the anterior pituitary. See, for example, U.S. Pat. No. 4,798,885. A protein of the invention may also be useful for advancement of the onset of fertility in sexually immature mammals, so as to increase the lifetime reproductive performance of domestic animals such as cows, sheep and pigs.

[0114] The activity of a protein of the invention may, among other means, be measured by the following methods:

[0115] Assays for activin/inhibin activity include, without limitation, those described in: Vale et al., Endocrinology 91:562-572, 1972; Ling et al., Nature 321:779-782, 1986; Vale et al., Nature 321:776-779, 1986; Mason et al., Nature 318:659-663, 1985; Forage et al., Proc. Natl. Acad. Sci. USA 83:3091-3095, 1986.

[0116] Chemotactic/Chemokinetic Activity

[0117] A protein of the present invention may have chemotactic or chemokinetic activity (e.g., act as a chemokine) for mammalian cells, including, for example, monocytes, fibroblasts, neutrophils, T-cells, mast cells, eosinophils, epithelial and/or endothelial cells. Chemotactic and chemokinetic proteins can be used to mobilize or attract a desired cell population to a desired site of action. Chemotactic or chemokinetic proteins provide particular advantages in treatment of wounds and other trauma to tissues, as well as in treatment of localized infections. For example, attraction of lymphocytes, monocytes or neutrophils to tumors or sites of infection may result in improved immune responses against the tumor or infecting agent.

[0118] A protein or peptide has chemotactic activity for a particular cell population if it can stimulate, directly or indirectly, the directed orientation or movement of such cell population. Preferably, the protein or peptide has the ability to directly stimulate directed movement of cells. Whether a particular protein has chemotactic activity for a population of cells can be readily determined by employing such protein or peptide in any known assay for cell chemotaxis.

[0119] The activity of a protein of the invention may, among other means, be measured by the following methods:

[0120] Assays for chemotactic activity (which will identify proteins that induce or prevent chemotaxis) consist of assays that measure the ability of a protein to induce the migration of cells across a membrane as well as the ability of a protein to induce the adhesion of one cell population to another cell population. Suitable assays for movement and adhesion include, without limitation, those described in: Current Protocols in Immunology, Ed by J. E. Coligan, A. M. Kruisbeek, D. H. Margulies, E. M. Shevach, W. Strober, Pub. Greene Publishing Associates and Wiley-Interscience (Chapter 6.12, Measurement of alpha and beta Chemokines 6.12.1-6.12.28; Taub et al. J. Clin. Invest. 95:1370-1376, 1995; Lind et al. APMIS 103:140-146, 1995; Muller et al Eur. J. Immunol. 25: 1744-1748; Gruber et al. J. of Immunol. 152:5860-5867, 1994; Johnston et al. J. of Immunol. 153: 1762-1768, 1994.

[0121] Hemostatic and Thrombolytic Activity

[0122] A protein of the invention may also exhibit hemostatic or thrombolytic activity. As a result, such a protein is expected to be useful in treatment of various coagulation disorders (including hereditary disorders, such as hemophilias) or to enhance coagulation and other hemostatic events in treating wounds resulting from trauma, surgery or other causes. A protein of the invention may also be useful for dissolving or inhibiting formation of thromboses and for treatment and prevention of conditions resulting therefrom (such as, for example, infarction of cardiac and central nervous system vessels (e.g., stroke).

[0123] The activity of a protein of the invention may, among other means, be measured by the following methods:

[0124] Assay for hemostatic and thrombolytic activity include, without limitation, those described in: Linet et al., J. Clin. Pharmacol. 26:131-140, 1986; Burdick et al., Thrombosis Res. 45:413-419, 1987; Humphrey et al., Fibrinolysis 5:71-79 (1991); Schaub, Prostaglandins 35:467-474, 1988.

[0125] Receptor/Ligand Activity

[0126] A protein of the present invention may also demonstrate activity as receptors, receptor ligands or inhibitors or agonists of receptor/ligand interactions. Examples of such receptors and ligands include, without limitation, cytokine receptors and their ligands, receptor kinases and their ligands, receptor phosphatases and their ligands, receptors involved in cell-cell interactions and their ligands (including without limitation, cellular adhesion molecules (such as selecting, integrins and their ligands) and receptor/ligand pairs involved in antigen presentation, antigen recognition and development of cellular and humoral immune responses). Receptors and ligands are also useful for screening of potential peptide or small molecule inhibitors of the relevant receptor/ligand interaction. A protein of the present invention (including, without limitation, fragments of receptors and ligands) may themselves be useful as inhibitors of receptor/ligand interactions.

[0127] The activity of a protein of the invention may, among other means, be measured by the following methods:

[0128] Suitable assays for receptor-ligand activity include without limitation those described in:Current Protocols in Immunology, Ed by J. E. Coligan, A. M. Kruisbeek, D. H. Margulies, E. M. Shevach, W. Strober, Pub. Greene Publishing Associates and Wiley-Interscience (Chapter 7.28, Measurement of Cellular Adhesion under static conditions 7.28.1-7.28.22), Takai et al., Proc. Natl. Acad. Sci. USA 84:6864-6868, 1987; Bierer et al., J. Exp. Med. 168:1145-1156, 1988; Rosenstein et al., J. Exp. Med. 169:149-160 1989; Stoltenborg et al., J. Immunol. Methods 175:59-68, 1994; Stitt et al., Cell 80:661-670, 1995.

[0129] Anti-Inflammatory Activity

[0130] Proteins of the present invention may also exhibit anti-inflammatory activity. The anti-inflammatory activity may be achieved by providing a stimulus to cells involved in the inflammatory response, by inhibiting or promoting cell-cell interactions (such as, for example, cell adhesion), by inhibiting or promoting chemotaxis of cells involved in the inflammatory process, inhibiting or promoting cell extravasation, or by stimulating or suppressing production of other factors which more directly inhibit or promote an inflammatory response. Proteins exhibiting such activities can be used to treat inflammatory conditions including chronic or acute conditions), including without limitation inflammation associated with infection (such as septic shock, sepsis or systemic inflammatory response syndrome (SIRS)), ischemia-reperfusion injury, endotoxin lethality, arthritis, complement-mediated hyperacute rejection, nephritis, cytokine or chemokine-induced lung injury, inflammatory bowel disease, Crohn's disease or resulting from over production of cytokines such as TNF or IL-1. Proteins of the invention may also be useful to treat anaphylaxis and hypersensitivity to an antigenic substance or material.

[0131] Tumor Inhibition Activity

[0132] In addition to the activities described above for immunological treatment or prevention of tumors, a protein of the invention may exhibit other anti-tumor activities. A protein may inhibit tumor growth directly or indirectly (such as, for example, via ADCC). A protein may exhibit its tumor inhibitory activity by acting on tumor tissue or tumor precursor tissue, by inhibiting formation of tissues necessary to support tumor growth (such as, for example, by inhibiting angiogenesis), by causing production of other factors, agents or cell types which inhibit tumor growth, or by suppressing, eliminating or inhibiting factors, agents or cell types which promote tumor growth.

[0133] Other Activities

[0134] A protein of the invention may also exhibit one or more of the following additional activities or effects: inhibiting the growth, infection or function of, or killing, infectious agents, including, without limitation, bacteria, viruses, fungi and other parasites; effecting (suppressing or enhancing) bodily characteristics, including, without limitation, height, weight, hair color, eye color, skin, fat to lean ratio or other tissue pigmentation, or organ or body part size or shape (such as, for example, breast augmentation or diminution, change in bone form or shape); effecting biorhythms or caricadic cycles or rhythms; effecting the fertility of male or female subjects; effecting the metabolism, catabolism, anabolism, processing, utilization, storage or elimination of dietary fat, lipid, protein, carbohydrate, vitamins, minerals, cofactors or other nutritional factors or component(s); effecting behavioral characteristics, including, without limitation, appetite, libido, stress, cognition (including cognitive disorders), depression (including depressive disorders) and violent behaviors; providing analgesic effects or other pain reducing effects; promoting differentiation and growth of embryonic stem cells in lineages other than hematopoietic lineages; hormonal or endocrine activity; in the case of enzymes, correcting deficiencies of the enzyme and treating deficiency-related diseases; treatment of hyperproliferative disorders (such as, for example, psoriasis); immunoglobulin-like activity (such as, for example, the ability to bind antigens or complement); and the ability to act as an antigen in a vaccine composition to raise an immune response against such protein or another material or entity which is cross-reactive with such protein.

[0135] Administration and Dosing

[0136] A protein of the present invention (from whatever source derived, including without limitation from recombinant and non-recombinant sources) may be used in a pharmaceutical composition when combined with a pharmaceutically acceptable carrier. Such a composition may also contain (in addition to protein and a carrier) diluents, fillers, salts, buffers, stabilizers, solubilizers, and other materials well known in the art. The term “pharmaceutically acceptable” means a non-toxic material that does not interfere with the effectiveness of the biological activity of the active ingredient(s). The characteristics of the carrier will depend on the route of administration. The pharmaceutical composition of the invention may also contain cytokines, lymphokines, or other hematopoietic factors such as M-CSF, GM-CSF, TNF, IL-1, IL-2, IL-3, IL4, IL-5, IL-6, IL-7, IL-8, IL-9, IL-10, IL-11, IL-12, IL-13, IL-14, IL-15, IFN, TNF0, TNF1, TNF2, G-CSF, Meg-CSF, thrombopoietin, stem cell factor, and erythropoietin. The pharmaceutical composition may further contain other agents which either enhance the activity of the protein or compliment its activity or use in treatment. Such additional factors and/or agents may be included in the pharmaceutical composition to produce a synergistic effect with protein of the invention, or to minimize side effects. Conversely, protein of the present invention may be included in formulations of the particular cytokine, lymphokine, other hematopoietic factor, thrombolytic or anti-thrombotic factor, or anti-inflammatory agent to minimize side effects of the cytokine, lymphokine, other hematopoietic factor, thrombolytic or anti-thrombotic factor, or anti-inflammatory agent.

[0137] A protein of the present invention may be active in multimers (e.g., heterodimers or homodimers) or complexes with itself or other proteins. As a result, pharmaceutical compositions of the invention may comprise a protein of the invention in such multimeric or complexed form.

[0138] The pharmaceutical composition of the invention may be in the form of a complex of the protein(s) of present invention along with protein or peptide antigens. The protein and/or peptide antigen will deliver a stimulatory signal to both B and T lymphocytes. B lymphocytes will respond to antigen through their surface immunoglobulin receptor. T lymphocytes will respond to antigen through the T cell receptor (TCR) following presentation of the antigen by MHC proteins. MHC and structurally related proteins including those encoded by class I and class II MHC genes on host cells will serve to present the peptide antigen(s) to T lymphocytes. The antigen components could also be supplied as purified MHC-peptide complexes alone or with co-stimulatory molecules that can directly signal T cells. Alternatively antibodies able to bind surface immunolgobulin and other molecules on B cells as well as antibodies able to bind the TCR and other molecules on T cells can be combined with the pharmaceutical composition of the invention.

[0139] The pharmaceutical composition of the invention may be in the form of a liposome in which protein of the present invention is combined, in addition to other pharmaceutically acceptable carriers, with amphipathic agents such as lipids which exist in aggregated form as micelles, insoluble monolayers, liquid crystals, or lamellar layers in aqueous solution. Suitable lipids for liposomal formulation include, without limitation, monoglycerides, diglycerides, sulfatides, lysolecithin, phospholipids, saponin, bile acids, and the like. Preparation of such liposomal formulations is within the level of skill in the art, as disclosed, for example, in U.S. Pat. Nos. 4,235,871; 4,501,728; 4,837,028; and 4,737,323, all of which are incorporated herein by reference.

[0140] As used herein, the term “therapeutically effective amount” means the total amount of each active component of the pharmaceutical composition or method that is sufficient to show a meaningful patient benefit, i.e., treatment, healing, prevention or amelioration of the relevant medical condition, or an increase in rate of treatment, healing, prevention or amelioration of such conditions. When applied to an individual active ingredient, administered alone, the term refers to that ingredient alone. When applied to a combination, the term refers to combined amounts of the active ingredients that result in the therapeutic effect, whether administered in combination, serially or simultaneously.

[0141] In practicing the method of treatment or use of the present invention, a therapeutically effective amount of protein of the present invention is administered to a mammal having a condition to be treated. Protein of the present invention may be administered in accordance with the method of the invention either alone or in combination with other therapies such as treatments employing cytokines, lymphokines or other hematopoietic factors. When co-administered with one or more cytokines, lymphokines or other hematopoietic factors, protein of the present invention may be administered either simultaneously with the cytokine(s), lymphokine(s), other hematopoietic factor(s), thrombolytic or anti-thrombotic factors, or sequentially. If administered sequentially, the attending physician will decide on the appropriate sequence of administering protein of the present invention in combination with cytokine(s), lymphokine(s), other hematopoietic factor(s), thrombolytic or anti-thrombotic factors.

[0142] Administration of protein of the present invention used in the pharmaceutical composition or to practice the method of the present invention can be carried out in a variety of conventional ways, such as oral ingestion, inhalation, topical application or cutaneous, subcutaneous, intraperitoneal, parenteral or intravenous injection. Intravenous administration to the patient is preferred.

[0143] When a therapeutically effective amount of protein of the present invention is administered orally, protein of the present invention will be in the form of a tablet, capsule, powder, solution or elixir. When administered in tablet form, the pharmaceutical composition of the invention may additionally contain a solid carrier such as a gelatin or an adjuvant. The tablet, capsule, and powder contain from about 5 to 95% protein of the present invention, and preferably from about 25 to 90% protein of the present invention. When administered in liquid form, a liquid carrier such as water, petroleum, oils of animal or plant origin such as peanut oil, mineral oil, soybean oil, or sesame oil, or synthetic oils may be added. The liquid form of the pharmaceutical composition may further contain physiological saline solution, dextrose or other saccharide solution, or glycols such as ethylene glycol, propylene glycol or polyethylene glycol. When administered in liquid form, the pharmaceutical composition contains from about 0.5 to 90% by weight of protein of the present invention, and preferably from about 1 to 50% protein of the present invention.

[0144] When a therapeutically effective amount of protein of the present invention is administered by intravenous, cutaneous or subcutaneous injection, protein of the present invention will be in the form of a pyrogen-free, parenterally acceptable aqueous solution. The preparation of such parenterally acceptable protein solutions, having due regard to pH, isotonicity, stability, and the like, is within the skill in the art. A preferred pharmaceutical composition for intravenous, cutaneous, or subcutaneous injection should contain, in addition to protein of the present invention, an isotonic vehicle such as Sodium Chloride Injection, Ringer's Injection, Dextrose Injection, Dextrose and Sodium Chloride Injection, Lactated Ringer's Injection, or other vehicle as known in the art. The pharmaceutical composition of the present invention may also contain stabilizers, preservatives, buffers, antioxidants, or other additives known to those of skill in the art.

[0145] The amount of protein of the present invention in the pharmaceutical composition of the present invention will depend upon the nature and severity of the condition being treated, and on the nature of prior treatments which the patient has undergone. Ultimately, the attending physician will decide the amount of protein of the present invention with which to treat each individual patient. Initially, the attending physician will administer low doses of protein of the present invention and observe the patient's response. Larger doses of protein of the present invention may be administered until the optimal therapeutic effect is obtained for the patient, and at that point the dosage is not increased further. It is contemplated that the various pharmaceutical compositions used to practice the method of the present invention should contain about 0.01 μg to about 100 mg (preferably about 0.1 ng to about 10 mg, more preferably about 0.1 μg to about 1 mg) of protein of the present invention per kg body weight.

[0146] The duration of intravenous therapy using the pharmaceutical composition of the present invention will vary, depending on the severity of the disease being treated and the condition and potential idiosyncratic response of each individual patient. It is contemplated that the duration of each application of the protein of the present invention will be in the range of 12 to 24 hours of continuous intravenous administration. Ultimately the attending physician will decide on the appropriate duration of intravenous therapy using the pharmaceutical composition of the present invention.

[0147] Protein of the invention may also be used to immunize animals to obtain polyclonal and monoclonal antibodies which specifically react with the protein. Such antibodies may be obtained using either the entire protein or fragments thereof as an immunogen. The peptide immunogens additionally may contain a cysteine residue at the carboxyl terminus, and are conjugated to a hapten such as keyhole limpet hemocyanin (KLH). Methods for synthesizing such peptides are known in the art, for example, as in R. P. Merrifield, J. Amer.Chem.Soc. 85, 2149-2154 (1963); J. L. Krstenansky, et al., FEBS Lett. 211, 10 (1987). Monoclonal antibodies binding to the protein of the invention may be useful diagnostic agents for the immunodetection of the protein. Neutralizing monoclonal antibodies binding to the protein may also be useful therapeutics for both conditions associated with the protein and also in the treatment of some forms of cancer where abnormal expression of the protein is involved. In the case of cancerous cells or leukemic cells, neutralizing monoclonal antibodies against the protein may be useful in detecting and preventing the metastatic spread of the cancerous cells, which may be mediated by the protein.

[0148] For compositions of the present invention which are useful for bone, cartilage, tendon or ligament regeneration, the therapeutic method includes administering the composition topically, systematically, or locally as an implant or device. When administered, the therapeutic composition for use in this invention is, of course, in a pyrogen-free, physiologically acceptable form. Further, the composition may desirably be encapsulated or injected in a viscous form for delivery to the site of bone, cartilage or tissue damage. Topical administration may be suitable for wound healing and tissue repair. Therapeutically useful agents other than a protein of the invention which may also optionally be included in the composition as described above, may alternatively or additionally, be administered simultaneously or sequentially with the composition in the methods of the invention. Preferably for bone and/or cartilage formation, the composition would include a matrix capable of delivering the protein-containing composition to the site of bone and/or cartilage damage, providing a structure for the developing bone and cartilage and optimally capable of being resorbed into the body. Such matrices may be formed of materials presently in use for other implanted medical applications.

[0149] The choice of matrix material is based on biocompatibility, biodegradability, mechanical properties, cosmetic appearance and interface properties. The particular application of the compositions will define the appropriate formulation. Potential matrices for the compositions may be biodegradable and chemically defined calcium sulfate, tricalciumphosphate, hydroxyapatite, polylactic acid, polyglycolic acid and polyanhydrides. Other potential materials are biodegradable and biologically well-defined, such as bone or dermal collagen. Further matrices are comprised of pure proteins or extracellular matrix components. Other potential matrices are nonbiodegradable and chemically defined, such as sintered hydroxapatite, bioglass, aluminates, or other ceramics. Matrices may be comprised of combinations of any of the above mentioned types of material, such as polylactic acid and hydroxyapatite or collagen and tricalciumphosphate. The bioceramics may be altered in composition, such as in calcium-aluminate-phosphate and processing to alter pore size, particle size, particle shape, and biodegradability.

[0150] Presently preferred is a 50:50 (mole weight) copolymer of lactic acid and glycolic acid in the form of porous particles having diameters ranging from 150 to 800 microns. In some applications, it will be useful to utilize a sequestering agent, such as carboxymethyl cellulose or autologous blood clot, to prevent the protein compositions from disassociating from the matrix.

[0151] A preferred family of sequestering agents is cellulosic materials such as alkylcelluloses (including hydroxyalkylcelluloses), including methylcellulose, ethylcellulose, hydroxyethylcellulose, hydroxypropylcellulose, hydroxypropyl-methylcellulose, and carboxymethylcellulose, the most preferred being cationic salts of carboxymethylcellulose (CMC). Other preferred sequestering agents include hyaluronic acid, sodium alginate, poly(ethylene glycol), polyoxyethylene oxide, carboxyvinyl polymer and poly(vinyl alcohol). The amount of sequestering agent useful herein is 0.5-20 wt %, preferably 1-10 wt % based on total formulation weight, which represents the amount necessary to prevent desorbtion of the protein from the polymer matrix and to provide appropriate handling of the composition, yet not so much that the progenitor cells are prevented from infiltrating the matrix, thereby providing the protein the opportunity to assist the osteogenic activity of the progenitor cells.

[0152] In further compositions, proteins of the invention may be combined with other agents beneficial to the treatment of the bone and/or cartilage defect, wound, or tissue in question. These agents include various growth factors such as epidermal growth factor (EGF), platelet derived growth factor (PDGF), transforming growth factors (TGF-α and TGF-β and insulin-like growth factor (IGF).

[0153] The therapeutic compositions are also presently valuable for veterinary applications. Particularly domestic animals and thoroughbred horses, in addition to humans, are desired patients for such treatment with proteins of the present invention.

[0154] The dosage regimen of a protein-containing pharmaceutical composition to be used in tissue regeneration will be determined by the attending physician considering various factors which modify the action of the proteins, e.g., amount of tissue weight desired to be formed, the site of damage, the condition of the damaged tissue, the size of a wound, type of damaged tissue (e.g., bone), the patient's age, sex, and diet, the severity of any infection, time of administration and other clinical factors. The dosage may vary with the type of matrix used in the reconstitution and with inclusion of other proteins in the pharmaceutical composition. For example, the addition of other known growth factors, such as IGF I (insulin like growth factor I), to the final composition, may also effect the dosage. Progress can be monitored by periodic assessment of tissue/bone growth and/or repair, for example, X-rays, histomorphometric determinations and tetracycline labeling.

[0155] Polynucleotides of the present invention can also be used for gene therapy. Such polynucleotides can be introduced either in vivo or ex vivo into cells for expression in a mammalian subject. Polynucleotides of the invention may also be administered by other known methods for introduction of nucleic acid into a cell or organism (including, without limitation, in the form of viral vectors or naked DNA).

[0156] Cells may also be cultured ex vivo in the presence of proteins of the present invention in order to proliferate or to produce a desired effect on or activity in such cells. Treated cells can then be introduced in vivo for therapeutic purposes.

[0157] Patent and literature references cited herein are incorporated by reference as if fully set forth.

What is claimed is:

1. An isolated polynucleotide comprising a nucleotide sequence selected from the group consisting of:
SEQ ID NO:1, SEQ ID NO:2, SEQ ID NO:3, SEQ ID NO:4, SEQ ID NO:5, SEQ ID NO:6, SEQ ID NO:7, SEQ ID NO:8, SEQ ID NO:9, SEQ ID NO:10, SEQ ID NO:11, SEQ ID NO:12, SEQ ID NO:13, SEQ ID NO:14, SEQ ID NO:15, SEQ ID NO:16, SEQ ID NO:17, SEQ ID NO:18, SEQ ID NO:19, SEQ ID NO:20, SEQ ID NO:21, SEQ ID NO:22, SEQ ID NO:23, SEQ ID NO:24, SEQ ID NO:25, SEQ ID NO:26, SEQ ID NO:27, SEQ ID NO:28, SEQ ID NO:29, SEQ ID NO:30, SEQ ID NO:31, SEQ ID NO:32, SEQ ID NO:33, SEQ ID NO:34, SEQ ID NO:35, SEQ ID NO:36, SEQ ID NO:37, SEQ ID NO:38, SEQ ID NO:39, SEQ ID NO:40, SEQ ID NO:41, SEQ ID NO:42, SEQ ID NO:43, SEQ ID NO:44, SEQ ID NO:45, SEQ ID NO:46, SEQ ID NO:47, SEQ ID NO:48, SEQ ID NO:49, SEQ ID NO:50, SEQ ID NO:51, SEQ ID NO:52, SEQ ID NO:53, SEQ ID NO:54, SEQ ID NO:55, SEQ ID NO:56, SEQ ID NO:57, SEQ ID NO:58, SEQ ID NO:59, SEQ ID NO:60, SEQ ID NO:61, SEQ ID NO:62, SEQ ID NO:63, SEQ ID NO:64, SEQ ID NO:65, SEQ ID NO:66, SEQ ID NO:67, SEQ ID NO:68, SEQ ID NO:69, SEQ ID NO:70, SEQ ID NO:71, SEQ ID NO:72, SEQ ID NO:73, SEQ ID NO:74, SEQ ID NO:75, SEQ ID NO:76, SEQ ID NO:77, SEQ ID NO:78, SEQ ID NO:79, SEQ ID NO:80, SEQ ID NO:81, SEQ ID NO:82, SEQ ID NO:83, SEQ ID NO:84, SEQ ID NO:85, SEQ ID NO:86, SEQ ID NO:87, SEQ ID NO:88, SEQ ID NO:89, SEQ ID NO:90, SEQ ID NO:91, SEQ ID NO:92, SEQ ID NO:93, SEQ ID NO:94, SEQ ID NO:95, SEQ ID NO:96, SEQ ID NO:97, SEQ ID NO:98, SEQ ID NO:99, SEQ ID NO:100, SEQ ID NO:101, SEQ ID NO:102, SEQ ID NO:103, SEQ ID NO:104, SEQ ID NO:105, SEQ ID NO:106, SEQ ID NO:107, SEQ ID NO:108, SEQ ID NO:109, SEQ ID NO:110, SEQ ID NO:111, SEQ ID NO:112, SEQ ID NO:113, SEQ ID NO:114, SEQ ID NO:115, SEQ ID NO:116, SEQ ID NO:117, SEQ ID NO:118, SEQ ID NO:119, SEQ ID NO:120, SEQ ID NO:121, SEQ ID NO:122, SEQ ID NO:123, SEQ ID NO:124, SEQ ID NO:125, SEQ ID NO:126, SEQ ID NO:127, SEQ ID NO:128, SEQ ID NO:129, SEQ ID NO:130, SEQ ID NO:131, SEQ ID NO:132, SEQ ID NO:133, SEQ ID NO:134, SEQ ID NO:135, SEQ ID NO:136, SEQ ID NO:137, SEQ ID NO:138, SEQ ID NO:139, SEQ ID NO:140, SEQ ID NO:141, SEQ ID NO:142, SEQ ID NO:143, SEQ ID NO:144, SEQ ID NO:145, SEQ ID NO:146, SEQ ID NO:147, SEQ ID NO:148, SEQ ID NO:149, SEQ ID NO:150, SEQ ID NO:151, SEQ ID NO:152, SEQ ID NO:153, SEQ ID NO:154, SEQ ID NO:155, SEQ ID NO:156, SEQ ID NO:157, SEQ ID NO:158, SEQ ID NO:159, SEQ ID NO:160, SEQ ID NO:161, SEQ ID NO:162, SEQ ID NO:163, SEQ ID NO:164, SEQ ID NO:165, SEQ ID NO:166, SEQ ID NO:167, SEQ ID NO:168, SEQ ID NO:169, SEQ ID NO:170, SEQ ID NO:171, SEQ ID NO:172, SEQ ID NO:173, SEQ ID NO:174, SEQ ID NO:175, SEQ ID NO:176, SEQ ID NO:177, SEQ ID NO:178, SEQ ID NO:179, SEQ ID NO:180, SEQ ID NO:181, SEQ ID NO:182, SEQ ID NO:183, SEQ ID NO:184, SEQ ID NO:185, SEQ ID NO:186, SEQ ID NO:187, SEQ ID NO:188, SEQ ID NO:189, SEQ ID NO:190, SEQ ID NO:191, SEQ ID NO:192, SEQ ID NO:193, SEQ ID NO:194, SEQ ID NO:195, SEQ ID NO:196, SEQ ID NO:197, SEQ ID NO:198, SEQ ID NO:199, SEQ ID NO:200, SEQ ID NO:201, SEQ ID NO:202, SEQ ID NO:203, SEQ ID NO:204, SEQ ID NO:205, SEQ ID NO:206, SEQ ID NO:207, SEQ ID NO:208, SEQ ID NO:209, SEQ ID NO:210, SEQ ID NO:211, SEQ ID NO:212, SEQ ID NO:213, SEQ ID NO:214, SEQ ID NO:215, SEQ ID NO:216, SEQ ID NO:217, SEQ ID NO:218, SEQ ID NO:219, SEQ ID NO:220, SEQ ID NO:221, SEQ ID NO:222, SEQ ID NO:223, SEQ ID NO:224, SEQ ID NO:225, SEQ ID NO:226, SEQ ID NO:227, SEQ ID NO:228, SEQ ID NO:229, SEQ ID NO:230, SEQ ID NO:231, SEQ ID NO:232, SEQ ID NO:233, SEQ ID NO:234, SEQ ID NO:235, SEQ ID NO:236, SEQ ID NO:237, SEQ ID NO:238, SEQ ID NO:239, SEQ ID NO:240, SEQ ID NO:241, SEQ ID NO:242, SEQ ID NO:243, SEQ ID NO:244, SEQ ID NO:245, SEQ ID NO:246, SEQ ID NO:247, SEQ ID NO:248, SEQ ID NO:249, SEQ ID NO:250, SEQ ID NO:251, SEQ ID NO:252, SEQ ID NO:253, SEQ ID NO:254, SEQ ID NO:255, SEQ ID NO:256, SEQ ID NO:257, SEQ ID NO:258, SEQ ID NO:259, SEQ ID NO:260, SEQ ID NO:261, SEQ ID NO:262, SEQ ID NO:263, SEQ ID NO:264, SEQ ID NO:265, SEQ ID NO:266, SEQ ID NO:267, SEQ ID NO:268, SEQ ID NO:269, SEQ ID NO:270, SEQ ID NO:271, SEQ ID NO:272, SEQ ID NO:273, SEQ ID NO:274, SEQ ID NO:275, SEQ ID NO:276, SEQ ID NO:277, SEQ ID NO:278, SEQ ID NO:279, SEQ ID NO:280, SEQ ID NO:281, SEQ ID NO:282, SEQ ID NO:283, SEQ ID NO:284, SEQ ID NO:285, SEQ ID NO:286, SEQ ID NO:287, SEQ ID NO:288, SEQ ID NO:289, SEQ ID NO:290, SEQ ID NO:291, SEQ ID NO:292, SEQ ID NO:293, SEQ ID NO:294, SEQ ID NO:295, SEQ ID NO:296, SEQ ID NO:297, SEQ ID NO:298, SEQ ID NO:299, SEQ ID NO:300, SEQ ID NO:301, SEQ ID NO:302, SEQ ID NO:303, SEQ ID NO:304, SEQ ID NO:305, SEQ ID NO:306, SEQ ID NO:307, SEQ ID NO:308, SEQ ID NO:309, SEQ ID NO:310, SEQ ID NO:311, SEQ ID NO:312, SEQ ID NO:313, SEQ ID NO:314, SEQ ID NO:315, SEQ ID NO:316, SEQ ID NO:317, SEQ ID NO:318, SEQ ID NO:319, SEQ ID NO:320, SEQ ID NO:321, SEQ ID NO:322, SEQ ID NO:323, SEQ ID NO:324, SEQ ID NO:325, SEQ ID NO:326, SEQ ID NO:327, SEQ ID NO:328, SEQ ID NO:329, SEQ ID NO:330, SEQ ID NO:330, SEQ ID NO:332, SEQ ID NO:333, SEQ ID NO:334, SEQ ID NO:335, SEQ ID NO:336, SEQ ID NO:337, SEQ ID NO:338, SEQ ID NO:339, SEQ ID NO:340, SEQ ID NO:341, SEQ ID NO:342, SEQ ID NO:343, SEQ ID NO:344, SEQ ID NO:345, SEQ ID NO:346, SEQ ID NO:347, SEQ ID NO:348, SEQ ID NO:349, SEQ ID NO:350, SEQ ID NO:351, SEQ ID NO:352, SEQ ID NO:353, SEQ ID NO:354, SEQ ID NO:355, SEQ ID NO:356, SEQ ID NO:357, SEQ ID NO:358, SEQ ID NO:359, SEQ ID NO:360, SEQ ID NO:361, SEQ ID NO:362, SEQ ID NO:363, SEQ ID NO:364, SEQ ID NO:365, SEQ ID NO:366, SEQ ID NO:367, SEQ ID NO:368, SEQ ID NO:369, SEQ ID NO:370, SEQ ID NO:371, SEQ ID NO:372, SEQ ID NO:373, SEQ ID NO:374, SEQ ID NO:375, SEQ ID NO:376, SEQ ID NO:377, SEQ ID NO:378, SEQ ID NO:379, SEQ ID NO:380, SEQ ID NO:381, SEQ ID NO:382, SEQ ID NO:383, SEQ ID NO:384, SEQ ID NO:385, SEQ ID NO:386, SEQ ID NO:387, SEQ ID NO:388, SEQ ID NO:389, SEQ ID NO:390, SEQ ID NO:391, SEQ ID NO:392, SEQ ID NO:393, SEQ ID NO:394, SEQ ID NO:395, SEQ ID NO:396, SEQ ID NO:397, SEQ ID NO:398, SEQ ID NO:399, SEQ ID NO:400, SEQ ID NO:401, SEQ ID NO:402, SEQ ID NO:403, SEQ ID NO:404, SEQ ID NO:405, SEQ ID NO:406, SEQ ID NO:407, SEQ ID NO:408, SEQ ID NO:409, SEQ ID NO:410, SEQ ID NO:411, SEQ ID NO:412, SEQ ID NO:413, SEQ ID NO:414, SEQ ID NO:415, SEQ ID NO:416, SEQ ID NO:417, SEQ ID NO:418, SEQ ID NO:419, SEQ ID NO:420, SEQ ID NO:421, SEQ ID NO:422, SEQ ID NO:423, SEQ ID NO:424, SEQ ID NO:425, SEQ ID NO:426, SEQ ID NO:427, SEQ ID NO:428, SEQ ID NO:429, SEQ ID NO:430, SEQ ID NO:431, SEQ ID NO:432, SEQ ID NO:433, SEQ ID NO:434, SEQ ID NO:435, SEQ ID NO:436, SEQ ID NO:437, SEQ ID NO:438, SEQ ID NO:439, SEQ ID NO:440, SEQ ID NO:441, SEQ ID NO:442, SEQ ID NO:443, SEQ ID NO:444, SEQ ID NO:445, SEQ ID NO:446, SEQ ID NO:447, SEQ ID NO:448, SEQ ID NO:449, SEQ ID NO:450, SEQ ID NO:451, SEQ ID NO:452, SEQ ID NO:453, SEQ ID NO:454, SEQ ID NO:455, SEQ ID NO:456, SEQ ID NO:457, SEQ ID NO:458, SEQ ID NO:459, SEQ ID NO:460, SEQ ID NO:461, SEQ ID NO:462, SEQ ID NO:463, SEQ ID NO:464, SEQ ID NO:465, SEQ ID NO:466, SEQ ID NO:467, SEQ ID NO:468, SEQ ID NO:469, SEQ ID NO:470, SEQ ID NO:471, SEQ ID NO:472, SEQ ID NO:473, SEQ ID NO:474, SEQ ID NO:475, SEQ ID NO:476, SEQ ID NO:477, SEQ ID NO:478, SEQ ID NO:479, SEQ ID NO:480, SEQ ID NO:481, SEQ ID NO:482, SEQ ID NO:483, SEQ ID NO:484, SEQ ID NO:485, SEQ ID NO:486, SEQ ID NO:487, SEQ ID NO:488, SEQ ID NO:489, SEQ ID NO:490, SEQ ID NO:491, SEQ ID NO:492, SEQ ID NO:493, SEQ ID NO:494, SEQ ID NO:495, SEQ ID NO:496, SEQ ID NO:497, SEQ ID NO:498, SEQ ID NO:499, SEQ ID NO:500, SEQ ID NO:501, SEQ ID NO:502, SEQ ID NO:503, SEQ ID NO:504, SEQ ID NO:505, SEQ ID NO:506, SEQ ID NO:507, SEQ ID NO:508, SEQ ID NO:509, SEQ ID NO:510, SEQ ID NO:511, SEQ ID NO:512, SEQ ID NO:513, SEQ ID NO:514, SEQ ID NO:515, SEQ ID NO:516, SEQ ID NO:517, SEQ ID NO:518, SEQ ID NO:519, SEQ ID NO:520, SEQ ID NO:521, SEQ ID NO:522, SEQ ID NO:523, SEQ ID NO:524, SEQ ID NO:525, SEQ ID NO:526, SEQ ID NO:527, SEQ ID NO:528, SEQ ID NO:529, SEQ ID NO:530, SEQ ID NO:531, SEQ ID NO:532, SEQ ID NO:533, SEQ ID NO:534, SEQ ID NO:535, SEQ ID NO:536, SEQ ID NO:537, SEQ ID NO:538, SEQ ID NO:539, SEQ ID NO:540, SEQ ID NO:541, SEQ ID NO:542, SEQ ID NO:543, SEQ ID NO:544, SEQ ID NO:545, SEQ ID NO:546, SEQ ID NO:547, SEQ ID NO:548, SEQ ID NO:549, SEQ ID NO:550, SEQ ID NO:551, SEQ ID NO:552, SEQ ID NO:543, SEQ ID NO:554, SEQ ID NO:555, SEQ ID NO:556, SEQ ID NO:557, SEQ ID NO:558, SEQ ID NO:559, SEQ ID NO:560, SEQ ID NO:561, SEQ ID NO:562, SEQ ID NO:563, SEQ ID NO:564, SEQ ID NO:565, SEQ ID NO:566, SEQ ID NO:567, SEQ ID NO:568, SEQ ID NO:569, SEQ ID NO:570, SEQ ID NO:571, SEQ ID NO:572, SEQ ID NO:573, SEQ ID NO:574, SEQ ID NO:575, SEQ ID NO:576, SEQ ID NO:577, SEQ ID NO:578, SEQ ID NO:579, SEQ ID NO:580, SEQ ID NO:581, SEQ ID NO:582, SEQ ID NO:583, SEQ ID NO:584, SEQ ID NO:585, SEQ ID NO:586, SEQ ID NO:587, SEQ ID NO:588, SEQ ID NO:589, SEQ ID NO:590, SEQ ID NO:591, SEQ ID NO:592, SEQ ID NO:593, SEQ ID NO:594, SEQ ID NO:595, SEQ ID NO:596, SEQ ID NO:597, SEQ ID NO:598, SEQ ID NO:599, SEQ ID NO:600, SEQ ID NO:601, SEQ ID NO:602, SEQ ID NO:603, SEQ ID NO:604, SEQ ID NO:605, SEQ ID NO:606, SEQ ID NO:607, SEQ ID NO:608, SEQ ID NO:609, SEQ ID NO:610, SEQ ID NO:611, SEQ ID NO:612, SEQ ID NO:613, SEQ ID NO:614, SEQ ID NO:615, SEQ ID NO:616, SEQ ID NO:617, SEQ ID NO:618, SEQ ID NO:619, SEQ ID NO:620, SEQ ID NO:621, SEQ ID NO:622, SEQ ID NO:623, SEQ ID NO:624, SEQ ID NO:625;
or a complement of said sequence.

2. An isolated polynucleotide consisting of a nucleotide sequence selected from the group consisting of:
SEQ ID NO:1, SEQ ID NO:2, SEQ ID NO:3, SEQ ID NO:4, SEQ ID NO:5, SEQ ID
NO:6, SEQ ID NO:7, SEQ ID NO:8, SEQ ID NO:9, SEQ ID NO:10, SEQ ID NO:11, SEQ ID NO:12, SEQ ID NO:13, SEQ ID NO:14, SEQ ID NO:15, SEQ ID NO:16, SEQ ID NO:17, SEQ ID NO:18, SEQ ID NO:19, SEQ ID NO:20, SEQ ID NO:21, SEQ ID NO:22, SEQ ID NO:23, SEQ ID NO:24, SEQ ID NO:25, SEQ ID NO:26, SEQ ID NO:27, SEQ ID NO:28, SEQ ID NO:29, SEQ ID NO:30, SEQ ID NO:31, SEQ ID NO:32, SEQ ID NO:33, SEQ ID NO:34, SEQ ID NO:35, SEQ ID NO:36, SEQ ID NO:37, SEQ ID NO:38, SEQ ID NO:39, SEQ ID NO:40, SEQ ID NO:41, SEQ ID NO:42, SEQ ID NO:43, SEQ ID NO:44, SEQ ID NO:45, SEQ ID NO:46, SEQ ID NO:47, SEQ ID NO:48, SEQ ID NO:49, SEQ ID NO:50, SEQ ID NO:51, SEQ ID NO:52, SEQ ID NO:53, SEQ ID NO:54, SEQ ID NO:55, SEQ ID NO:56, SEQ ID NO:57, SEQ ID NO:58, SEQ ID NO:59, SEQ ID NO:60, SEQ ID NO:61, SEQ ID NO:62, SEQ ID NO:63, SEQ ID NO:64, SEQ ID NO:65, SEQ ID NO:66, SEQ ID NO:67, SEQ ID NO:68, SEQ ID NO:69, SEQ ID NO:70, SEQ ID NO:71, SEQ ID NO:72, SEQ ID NO:73, SEQ ID NO:74, SEQ ID NO:75, SEQ ID NO:76, SEQ ID NO:77, SEQ ID NO:78, SEQ ID NO:79, SEQ ID NO:80, SEQ ID NO:81, SEQ ID NO:82, SEQ ID NO:83, SEQ ID NO:84, SEQ ID NO:85, SEQ ID NO:86, SEQ ID NO:87, SEQ ID NO:88, SEQ ID NO:89, SEQ ID NO:90, SEQ ID NO:91, SEQ ID NO:92, SEQ ID NO:93, SEQ ID NO:94, SEQ ID NO:95, SEQ ID NO:96, SEQ ID NO:97, SEQ ID NO:98, SEQ ID NO:99, SEQ ID NO:100, SEQ ID NO:101, SEQ ID NO:102, SEQ ID NO:103, SEQ ID NO:104, SEQ ID NO:105, SEQ ID NO:106, SEQ ID NO:107, SEQ ID NO:108, SEQ ID NO:109, SEQ ID NO:110, SEQ ID NO:111, SEQ ID NO:112, SEQ ID NO:113, SEQ ID NO:114, SEQ ID NO:115, SEQ ID NO:116, SEQ ID NO:117, SEQ ID NO:118, SEQ ID NO:119, SEQ ID NO:120, SEQ ID NO:121, SEQ ID NO:122, SEQ ID NO:123, SEQ ID NO:124, SEQ ID NO:125, SEQ ID NO:126, SEQ ID NO:127, SEQ ID NO:128, SEQ ID NO:129, SEQ ID NO:130, SEQ ID NO:131, SEQ ID NO:132, SEQ ID NO:133, SEQ ID NO:134, SEQ ID NO:135, SEQ ID NO:136, SEQ ID NO:137, SEQ ID NO:138, SEQ ID NO:139, SEQ ID NO:140, SEQ ID NO:141, SEQ ID NO:142, SEQ ID NO:143, SEQ ID NO:144, SEQ ID NO:145, SEQ ID NO:146, SEQ ID NO:147, SEQ ID NO:148, SEQ ID NO:149, SEQ ID NO:150, SEQ ID NO:151, SEQ ID NO:152, SEQ ID NO:153, SEQ ID NO:154, SEQ ID NO:155, SEQ ID NO:156, SEQ ID NO:157, SEQ ID NO:158, SEQ ID NO:159, SEQ ID NO:160, SEQ ID NO:161, SEQ ID NO:162, SEQ ID NO:163, SEQ ID NO:164, SEQ ID NO:165, SEQ ID NO:166, SEQ ID NO:167, SEQ ID NO:168, SEQ ID NO:169, SEQ ID NO:170, SEQ ID NO:171, SEQ ID NO:172, SEQ ID NO:173, SEQ ID NO:174, SEQ ID NO:175, SEQ ID NO:176, SEQ ID NO:177, SEQ ID NO:178, SEQ ID NO:179, SEQ ID NO:180, SEQ ID NO:181, SEQ ID NO:182, SEQ ID NO:183, SEQ ID NO:184, SEQ ID NO:185, SEQ ID NO:186, SEQ ID NO:187, SEQ ID NO:188, SEQ ID NO:189, SEQ ID NO:190, SEQ ID NO:191, SEQ ID NO:192, SEQ ID NO:193, SEQ ID NO:194, SEQ ID NO:195, SEQ ID NO:196, SEQ ID NO:197, SEQ ID NO:198, SEQ ID NO:199, SEQ ID NO:200, SEQ ID NO:201, SEQ ID NO:202, SEQ ID NO:203, SEQ ID NO:204, SEQ ID NO:205, SEQ ID NO:206, SEQ ID NO:207, SEQ ID NO:208, SEQ ID NO:209, SEQ ID NO:210, SEQ ID NO:211, SEQ ID NO:212, SEQ ID NO:213, SEQ ID NO:214, SEQ ID NO:215, SEQ ID NO:216, SEQ ID NO:217, SEQ ID NO:218, SEQ ID NO:219, SEQ ID NO:220, SEQ ID NO:221, SEQ ID NO:222, SEQ ID NO:223, SEQ ID NO:224, SEQ ID NO:225, SEQ ID NO:226, SEQ ID NO:227, SEQ ID NO:228, SEQ ID NO:229, SEQ ID NO:230, SEQ ID NO:231, SEQ ID NO:232, SEQ ID NO:233, SEQ ID NO:234, SEQ ID NO:235, SEQ ID NO:236, SEQ ID NO:237, SEQ ID NO:238, SEQ ID NO:239, SEQ ID NO:240, SEQ ID NO:241, SEQ ID NO:242, SEQ ID NO:243, SEQ ID NO:244, SEQ ID NO:245, SEQ ID NO:246, SEQ ID NO:247, SEQ ID NO:248, SEQ ID NO:249, SEQ ID NO:250, SEQ ID NO:251, SEQ ID NO:252, SEQ ID NO:253, SEQ ID NO:254, SEQ ID NO:255, SEQ ID NO:256, SEQ ID NO:257, SEQ ID NO:258, SEQ ID NO:259, SEQ ID NO:260, SEQ ID NO:261, SEQ ID NO:262, SEQ ID NO:263, SEQ ID NO:264, SEQ ID NO:265, SEQ ID NO:266, SEQ ID NO:267, SEQ ID NO:268, SEQ ID NO:269, SEQ ID NO:270, SEQ ID NO:271, SEQ ID NO:272, SEQ ID NO:273, SEQ ID NO:274, SEQ ID NO:275, SEQ ID NO:276, SEQ ID NO:277, SEQ ID NO:278, SEQ ID NO:279, SEQ ID NO:280, SEQ ID NO:281, SEQ ID NO:282, SEQ ID NO:283, SEQ ID NO:284, SEQ ID NO:285, SEQ ID NO:286, SEQ ID NO:287, SEQ ID NO:288, SEQ ID NO:289, SEQ ID NO:290, SEQ ID NO:291, SEQ ID NO:292, SEQ ID NO:293, SEQ ID NO:294, SEQ ID NO:295, SEQ ID NO:296, SEQ ID NO:297, SEQ ID NO:298, SEQ ID NO:299, SEQ ID NO:300, SEQ ID NO:301, SEQ ID NO:302, SEQ ID NO:303, SEQ ID NO:304, SEQ ID NO:305, SEQ ID NO:306, SEQ ID NO:307, SEQ ID NO:308, SEQ ID NO:309, SEQ ID NO:310, SEQ ID NO:311, SEQ ID NO:312, SEQ ID NO:313, SEQ ID NO:314, SEQ ID NO:315, SEQ ID NO:316, SEQ ID NO:317, SEQ ID NO:318, SEQ ID NO:319, SEQ ID NO:320, SEQ ID NO:321, SEQ ID NO:322, SEQ ID NO:323, SEQ ID NO:324, SEQ ID NO:325, SEQ ID NO:326, SEQ ID NO:327, SEQ ID NO:328, SEQ ID NO:329, SEQ ID NO:330, SEQ ID NO:331, SEQ ID NO:332, SEQ ID NO:333, SEQ ID NO:334, SEQ ID NO:335, SEQ ID NO:336, SEQ ID NO:337, SEQ ID NO:338, SEQ ID NO:339, SEQ ID NO:340, SEQ ID NO:341, SEQ ID NO:342, SEQ ID NO:343, SEQ ID NO:344, SEQ ID NO:345, SEQ ID NO:346, SEQ ID NO:347, SEQ ID NO:348, SEQ ID NO:349, SEQ ID NO:350, SEQ ID NO:351, SEQ ID NO:352, SEQ ID NO:353, SEQ ID NO:354, SEQ ID NO:355, SEQ ID NO:356, SEQ ID NO:357, SEQ ID NO:358, SEQ ID NO:359, SEQ ID NO:360, SEQ ID NO:361, SEQ ID NO:362, SEQ ID NO:363, SEQ ID NO:364, SEQ ID NO:365, SEQ ID NO:366, SEQ ID NO:367, SEQ ID NO:368, SEQ ID NO:369, SEQ ID NO:370, SEQ ID NO:371, SEQ ID NO:372, SEQ ID NO:373, SEQ ID NO:374, SEQ ID NO:375, SEQ ID NO:376, SEQ ID NO:377, SEQ ID NO:378, SEQ ID NO:379, SEQ ID NO:380, SEQ ID NO:381, SEQ ID NO:382, SEQ ID NO:383, SEQ ID NO:384, SEQ ID NO:385, SEQ ID NO:386, SEQ ID NO:387, SEQ ID NO:388, SEQ ID NO:389, SEQ ID NO:390, SEQ ID NO:391, SEQ ID NO:392, SEQ ID NO:393, SEQ ID NO:394, SEQ ID NO:395, SEQ ID NO:396, SEQ ID NO:397, SEQ ID NO:398, SEQ ID NO:399, SEQ ID NO:400, SEQ ID NO:401, SEQ ID NO:402, SEQ ID NO:403, SEQ ID NO:404, SEQ ID NO:405, SEQ ID NO:406, SEQ ID NO:407, SEQ ID NO:408, SEQ ID NO:409, SEQ ID NO:410, SEQ ID NO:411, SEQ ID NO:412, SEQ ID NO:413, SEQ ID NO:414, SEQ ID NO:415, SEQ ID NO:416, SEQ ID NO:417, SEQ ID NO:418, SEQ ID NO:419, SEQ ID NO:420, SEQ ID NO:421, SEQ ID NO:422, SEQ ID NO:423, SEQ ID NO:424, SEQ ID NO:425, SEQ ID NO:426, SEQ ID NO:427, SEQ ID NO:428, SEQ ID NO:429, SEQ ID NO:430, SEQ ID NO:431, SEQ ID NO:432, SEQ ID NO:433, SEQ ID NO:434, SEQ ID NO:435, SEQ ID NO:436, SEQ ID NO:437, SEQ ID NO:438, SEQ ID NO:439, SEQ ID NO:440, SEQ ID NO:441, SEQ ID NO:442, SEQ ID NO:443, SEQ ID NO:444, SEQ ID NO:445, SEQ ID NO:446, SEQ ID NO:447, SEQ ID NO:448, SEQ ID NO:449, SEQ ID NO:450, SEQ ID NO:451, SEQ ID NO:452, SEQ ID NO:453, SEQ ID NO:454, SEQ ID NO:455, SEQ ID NO:456, SEQ ID NO:457, SEQ ID NO:458, SEQ ID NO:459, SEQ ID NO:460, SEQ ID NO:461, SEQ ID NO:462, SEQ ID NO:463, SEQ ID NO:464, SEQ ID NO:465, SEQ ID NO:466, SEQ ID NO:467, SEQ ID NO:468, SEQ ID NO:469, SEQ ID NO:470, SEQ ID NO:471, SEQ ID NO:472, SEQ ID NO:473, SEQ ID NO:474, SEQ ID NO:475, SEQ ID NO:476, SEQ ID NO:477, SEQ ID NO:478, SEQ ID NO:479, SEQ ID NO:480, SEQ ID NO:481, SEQ ID NO:482, SEQ ID NO:483, SEQ ID NO:484, SEQ ID NO:485, SEQ ID NO:486, SEQ ID NO:487, SEQ ID NO:488, SEQ ID NO:489, SEQ ID NO:490, SEQ ID NO:491, SEQ ID NO:492, SEQ ID NO:493, SEQ ID NO:494, SEQ ID NO:495, SEQ ID NO:496, SEQ ID NO:497, SEQ ID NO:498, SEQ ID NO:499, SEQ ID NO:500, SEQ ID NO:501, SEQ ID NO:502, SEQ ID NO:503, SEQ ID NO:504, SEQ ID NO:505, SEQ ID NO:506, SEQ ID NO:507, SEQ ID NO:508, SEQ ID NO:509, SEQ ID NO:510, SEQ ID NO:511, SEQ ID NO:512, SEQ ID NO:513, SEQ ID NO:514, SEQ ID NO:515, SEQ ID NO:516, SEQ ID NO:517, SEQ ID NO:518, SEQ ID NO:519, SEQ ID NO:520, SEQ ID NO:521, SEQ ID NO:522, SEQ ID NO:523, SEQ ID NO:524, SEQ ID NO:525, SEQ ID NO:526, SEQ ID NO:527, SEQ ID NO:528, SEQ ID NO:529, SEQ ID NO:530, SEQ ID NO:531, SEQ ID NO:532, SEQ ID NO:533, SEQ ID NO:534, SEQ ID NO:535, SEQ ID NO:536, SEQ ID NO:537, SEQ ID NO:538, SEQ ID NO:539, SEQ ID NO:540, SEQ ID NO:541, SEQ ID NO:542, SEQ ID NO:543, SEQ ID NO:544, SEQ ID NO:545, SEQ ID NO:546, SEQ ID NO:547, SEQ ID NO:548, SEQ ID NO:549, SEQ ID NO:550, SEQ ID NO:551, SEQ ID NO:552, SEQ ID NO:553, SEQ ID NO:554, SEQ ID NO:555, SEQ ID NO:556, SEQ ID NO:557, SEQ ID NO:558, SEQ ID NO:559, SEQ ID NO:560, SEQ ID NO:561, SEQ ID NO:562, SEQ ID NO:563, SEQ ID NO:564, SEQ ID NO:565, SEQ ID NO:566, SEQ ID NO:567, SEQ ID NO:568, SEQ ID NO:569, SEQ ID NO:570, SEQ ID NO:571, SEQ ID NO:572, SEQ ID NO:573, SEQ ID NO:574, SEQ ID NO:575, SEQ ID NO:576, SEQ ID NO:577, SEQ ID NO:578, SEQ ID NO:579, SEQ ID NO:580, SEQ ID NO:581, SEQ ID NO:582, SEQ ID NO:583, SEQ ID NO:584, SEQ ID NO:585, SEQ ID NO:586, SEQ ID NO:587, SEQ ID NO:588, SEQ ID NO:589, SEQ ID NO:590, SEQ ID NO:591, SEQ ID NO:592, SEQ ID NO:593, SEQ ID NO:594, SEQ ID NO:595, SEQ ID NO:596, SEQ ID NO:597, SEQ ID NO:598, SEQ ID NO:599, SEQ ID NO:600, SEQ ID NO:601, SEQ ID NO:602, SEQ ID NO:603, SEQ ID NO:604, SEQ ID NO:605, SEQ ID NO:606, SEQ ID NO:607, SEQ ID NO:608, SEQ ID NO:609, SEQ ID NO:610, SEQ ID NO:611, SEQ ID NO:612, SEQ ID NO:613, SEQ ID NO:614, SEQ ID NO:615, SEQ ID NO:616, SEQ ID NO:617, SEQ ID NO:618, SEQ ID NO:619, SEQ ID NO:620, SEQ ID NO:621, SEQ ID NO:622, SEQ ID NO:623, SEQ ID NO:624, SEQ ID NO:625;
or a complement of said sequence.

3. An isolated polynucleotide comprising a nucleotide sequence which hybridizes to a sequence selected from the group consisting of:
SEQ ID NO:1, SEQ ID NO:2, SEQ ID NO:3, SEQ ID NO:4, SEQ ID NO:5, SEQ ID NO:6, SEQ ID NO:7, SEQ ID NO:8, SEQ ID NO:9, SEQ ID NO:10, SEQ ID NO:11, SEQ ID NO:12, SEQ ID NO:13, SEQ ID NO:14, SEQ ID NO:15, SEQ ID NO:16, SEQ ID NO:17, SEQ ID NO:18, SEQ ID NO:19, SEQ ID NO:20, SEQ ID NO:21, SEQ ID NO:22, SEQ ID NO:23, SEQ ID NO:24, SEQ ID NO:25, SEQ ID NO:26, SEQ ID NO:27, SEQ ID NO:28, SEQ ID NO:29, SEQ ID NO:30, SEQ ID NO:31, SEQ ID NO:32, SEQ ID NO:33, SEQ ID NO:34, SEQ ID NO:35, SEQ ID NO:36, SEQ ID NO:37, SEQ ID NO:38, SEQ ID NO:39, SEQ ID NO:40, SEQ ID NO:41, SEQ ID NO:42, SEQ ID NO:43, SEQ ID NO:44, SEQ ID NO:45, SEQ ID NO:46, SEQ ID NO:47, SEQ ID NO:48, SEQ ID NO:49, SEQ ID NO:50, SEQ ID NO:51, SEQ ID NO:52, SEQ ID NO:53, SEQ ID NO:54, SEQ ID NO:55, SEQ ID NO:56, SEQ ID NO:57, SEQ ID NO:58, SEQ ID NO:59, SEQ ID NO:60, SEQ ID NO:61, SEQ ID NO:62, SEQ ID NO:63, SEQ ID NO:64, SEQ ID NO:65, SEQ ID NO:66, SEQ ID NO:67, SEQ ID NO:68, SEQ ID NO:69, SEQ ID NO:70, SEQ ID NO:71, SEQ ID NO:72, SEQ ID NO:73, SEQ ID NO:74, SEQ ID NO:75, SEQ ID NO:76, SEQ ID NO:77, SEQ ID NO:78, SEQ ID NO:79, SEQ ID NO:80, SEQ ID NO:81, SEQ ID NO:82, SEQ ID NO:83, SEQ ID NO:84, SEQ ID NO:85, SEQ ID NO:86, SEQ ID NO:87, SEQ ID NO:88, SEQ ID NO:89, SEQ ID NO:90, SEQ ID NO:91, SEQ ID NO:92, SEQ ID NO:93, SEQ ID NO:94, SEQ ID NO:95, SEQ ID NO:96, SEQ ID NO:97, SEQ ID NO:98, SEQ ID NO:99, SEQ ID NO:100, SEQ ID NO:101, SEQ ID NO:102, SEQ ID NO:103, SEQ ID NO:104, SEQ ID NO:105, SEQ ID NO:106, SEQ ID NO:107, SEQ ID NO:108, SEQ ID NO:109, SEQ ID NO:110, SEQ ID NO:111, SEQ ID NO:112, SEQ ID NO:113, SEQ ID NO:114, SEQ ID NO:115, SEQ ID NO:116, SEQ ID NO:117, SEQ ID NO:118, SEQ ID NO:119, SEQ ID NO:120, SEQ ID NO:121, SEQ ID NO:122, SEQ ID NO:123, SEQ ID NO:124, SEQ ID NO:125, SEQ ID NO:126, SEQ ID NO:127, SEQ ID NO:128, SEQ ID NO:129, SEQ ID NO:130, SEQ ID NO:131, SEQ ID NO:132, SEQ ID NO:133, SEQ ID NO:134, SEQ ID NO:135, SEQ ID NO:136, SEQ ID NO:137, SEQ ID NO:138, SEQ ID NO:139, SEQ ID NO:140, SEQ ID NO:141, SEQ ID NO:142, SEQ ID NO:143, SEQ ID NO:144, SEQ ID NO:145, SEQ ID NO.146, SEQ ID NO:147, SEQ ID NO:148, SEQ ID NO:149, SEQ ID NO:150, SEQ ID NO:151, SEQ ID NO:152, SEQ ID NO:153, SEQ ID NO:154, SEQ ID NO:155, SEQ ID NO:156, SEQ ID NO:157, SEQ ID NO:158, SEQ ID NO:159, SEQ ID NO:160, SEQ ID NO:161, SEQ ID NO:162, SEQ ID NO:163, SEQ ID NO:164, SEQ ID NO:165, SEQ ID NO:166, SEQ ID NO:167, SEQ ID NO:168, SEQ ID NO:169, SEQ ID NO:170, SEQ ID NO:171, SEQ ID NO:172, SEQ ID NO:173, SEQ ID NO:174, SEQ ID NO:175, SEQ ID NO:176, SEQ ID NO:177, SEQ ID NO:178, SEQ ID NO:179, SEQ ID NO:180, SEQ ID NO:181, SEQ ID NO:182, SEQ ID NO:183, SEQ ID NO:184, SEQ ID NO:185, SEQ ID NO:186, SEQ ID NO:187, SEQ ID NO:188, SEQ ID NO:189, SEQ ID NO:190, SEQ ID NO:191, SEQ ID NO:192, SEQ ID NO:193, SEQ ID NO:194, SEQ ID NO:195, SEQ ID NO:196, SEQ ID NO:197, SEQ ID NO:198, SEQ ID NO:199, SEQ ID NO:200, SEQ ID NO:201, SEQ ID NO:202, SEQ ID NO:203, SEQ ID NO:204, SEQ ID NO:205, SEQ ID NO:206, SEQ ID NO:207, SEQ ID NO:208, SEQ ID NO:209, SEQ ID NO:210, SEQ ID NO:211, SEQ ID NO:212, SEQ ID NO:213, SEQ ID NO:214, SEQ ID NO:215, SEQ ID NO:216, SEQ ID NO:217, SEQ ID NO:218, SEQ ID NO:219, SEQ ID NO:220, SEQ ID NO:221, SEQ ID NO:222, SEQ ID NO:223, SEQ ID NO:224, SEQ ID NO:225, SEQ ID NO:226, SEQ ID NO:227, SEQ ID NO:228, SEQ ID NO:229, SEQ ID NO:230, SEQ ID NO:231, SEQ ID NO:232, SEQ ID NO:233, SEQ ID NO:234, SEQ ID NO:235, SEQ ID NO:236, SEQ ID NO:237, SEQ ID NO:238, SEQ ID NO:239, SEQ ID NO:240, SEQ ID NO:241, SEQ ID NO:242, SEQ ID NO:243, SEQ ID NO:244, SEQ ID NO:245, SEQ ID NO:246, SEQ ID NO:247, SEQ ID NO:248, SEQ ID NO:249, SEQ ID NO:250, SEQ ID NO:251, SEQ ID NO:252, SEQ ID NO:253, SEQ ID NO:254, SEQ ID NO:255, SEQ ID NO:256, SEQ ID NO:257, SEQ ID NO:258, SEQ ID NO:259, SEQ ID NO:260, SEQ ID NO:261, SEQ ID NO:262, SEQ ID NO:263, SEQ ID NO:264, SEQ ID NO:265, SEQ ID NO:266, SEQ ID NO:267, SEQ ID NO:268, SEQ ID NO:269, SEQ ID NO:270, SEQ ID NO:271, SEQ ID NO:272, SEQ ID NO:273, SEQ ID NO:274, SEQ ID NO:275, SEQ ID NO:276, SEQ ID NO:277, SEQ ID NO:278, SEQ ID NO:279, SEQ ID NO:280, SEQ ID NO:281, SEQ ID NO:282, SEQ ID NO:283, SEQ ID NO:284, SEQ ID NO:285, SEQ ID NO:286, SEQ ID NO:287, SEQ ID NO:288, SEQ ID NO:289, SEQ ID NO:290, SEQ ID NO:291, SEQ ID NO:292, SEQ ID NO:293, SEQ ID NO:294, SEQ ID NO:295, SEQ ID NO:296, SEQ ID NO:297, SEQ ID NO:298, SEQ ID NO:299, SEQ ID NO:300, SEQ ID NO:301, SEQ ID NO:302, SEQ ID NO:303, SEQ ID NO:304, SEQ ID NO:305, SEQ ID NO:306, SEQ ID NO:307, SEQ ID NO:308, SEQ ID NO:309, SEQ ID NO:310, SEQ ID NO:311, SEQ ID NO:312, SEQ ID NO:313, SEQ ID NO:314, SEQ ID NO:315, SEQ ID NO:316, SEQ ID NO:317, SEQ ID NO:318, SEQ ID NO:319, SEQ ID NO:320, SEQ ID NO:321, SEQ ID NO:322, SEQ ID NO:323, SEQ ID NO:324, SEQ ID NO:325, SEQ ID NO:326, SEQ ID NO:327, SEQ ID NO:328, SEQ ID NO:329, SEQ ID NO:330, SEQ ID NO:331, SEQ ID NO:332, SEQ ID NO:333, SEQ ID NO:334, SEQ ID NO:335, SEQ ID NO:336, SEQ ID NO:337, SEQ ID NO:338, SEQ ID NO:339, SEQ ID NO:340, SEQ ID NO:341, SEQ ID NO:342, SEQ ID NO:343, SEQ ID NO:344, SEQ ID NO:345, SEQ ID NO:346, SEQ ID NO:347, SEQ ID NO:348, SEQ ID NO:349, SEQ ID NO:350, SEQ ID NO:351, SEQ ID NO:352, SEQ ID NO:353, SEQ ID NO:354, SEQ ID NO:355, SEQ ID NO:356, SEQ ID NO:357, SEQ ID NO:358, SEQ ID NO:359, SEQ ID NO:360, SEQ ID NO:361, SEQ ID NO:362, SEQ ID NO:363, SEQ ID NO:364, SEQ ID NO:365, SEQ ID NO:366, SEQ ID NO:367, SEQ ID NO:368, SEQ ID NO:369, SEQ ID NO:370, SEQ ID NO:371, SEQ ID NO:372, SEQ ID NO:373, SEQ ID NO:374, SEQ ID NO:375, SEQ ID NO:376, SEQ ID NO:377, SEQ ID NO:378, SEQ ID NO:379, SEQ ID NO:380, SEQ ID NO:381, SEQ ID NO:382, SEQ ID NO:383, SEQ ID NO:384, SEQ ID NO:385, SEQ ID NO:386, SEQ ID NO:387, SEQ ID NO:388, SEQ ID NO:389, SEQ ID NO:390, SEQ ID NO:391, SEQ ID NO:392, SEQ ID NO:393, SEQ ID NO:394, SEQ ID NO:395, SEQ ID NO:396, SEQ ID NO:397, SEQ ID NO:398, SEQ ID NO:399, SEQ ID NO:400, SEQ ID NO:401, SEQ ID NO:402, SEQ ID NO:433, SEQ ID NO:404, SEQ ID NO:405, SEQ ID NO:406, SEQ ID NO:407, SEQ ID NO:408, SEQ ID NO:409, SEQ ID NO:410, SEQ ID NO:411, SEQ ID NO:412, SEQ ID NO:413, SEQ ID NO:414, SEQ ID NO:415, SEQ ID NO:416, SEQ ID NO:417, SEQ ID NO:418, SEQ ID NO:419, SEQ ID NO:420, SEQ ID NO:421, SEQ ID NO:422, SEQ ID NO:423, SEQ ID NO:424, SEQ ID NO:425, SEQ ID NO:426, SEQ ID NO:427, SEQ ID NO:428, SEQ ID NO:429, SEQ ID NO:430, SEQ ID NO:431, SEQ ID NO:432, SEQ ID NO:433, SEQ ID NO:434, SEQ ID NO:435, SEQ ID NO:436, SEQ ID NO:437, SEQ ID NO:438, SEQ ID NO:439, SEQ ID NO:440, SEQ ID NO:441, SEQ ID NO:442, SEQ ID NO:443, SEQ ID NO:444, SEQ ID NO:445, SEQ ID NO:446, SEQ ID NO:447, SEQ ID NO:448, SEQ ID NO:449, SEQ ID NO:450, SEQ ID NO:451, SEQ ID NO:452, SEQ ID NO:453, SEQ ID NO:454, SEQ ID NO:455, SEQ ID NO:456, SEQ ID NO:457, SEQ ID NO:458, SEQ ID NO:459, SEQ ID NO:460, SEQ ID NO:461, SEQ ID NO:462, SEQ ID NO:463, SEQ ID NO:464, SEQ ID NO:465, SEQ ID NO:466, SEQ ID NO:467, SEQ ID NO:468, SEQ ID NO:469, SEQ ID NO:470, SEQ ID NO:471, SEQ ID NO:472, SEQ ID NO:473, SEQ ID NO:474, SEQ ID NO:475, SEQ ID NO:476, SEQ ID NO:477, SEQ ID NO:478, SEQ ID NO:479, SEQ ID NO:480, SEQ ID NO:481, SEQ ID NO:482, SEQ ID NO:483, SEQ ID NO:484, SEQ ID NO:485, SEQ ID NO:486, SEQ ID NO:487, SEQ ID NO:488, SEQ ID NO:489, SEQ ID NO:490, SEQ ID NO:491, SEQ ID NO:492, SEQ ID NO:493, SEQ ID NO:494, SEQ ID NO:495, SEQ ID NO:496, SEQ ID NO:497, SEQ ID NO:498, SEQ ID NO:499, SEQ ID NO:500, SEQ ID NO:501, SEQ ID NO:502, SEQ ID NO:503, SEQ ID NO:504, SEQ ID NO:505, SEQ ID NO:506, SEQ ID NO:507, SEQ ID NO:508, SEQ ID NO:509, SEQ ID NO:510, SEQ ID NO:511, SEQ ID NO:512, SEQ ID NO:513, SEQ ID NO:514, SEQ ID NO:515, SEQ ID NO:516, SEQ ID NO:517, SEQ ID NO:518, SEQ ID NO:519, SEQ ID NO:520, SEQ ID NO:521, SEQ ID NO:522, SEQ ID NO:523, SEQ ID NO:524, SEQ ID NO:525, SEQ ID NO:526, SEQ ID NO:527, SEQ ID NO:528, SEQ ID NO:529, SEQ ID NO:530, SEQ ID NO:531, SEQ ID NO:532, SEQ ID NO:533, SEQ ID NO:534, SEQ ID NO:535, SEQ ID NO:536, SEQ ID NO:537, SEQ ID NO:538, SEQ ID NO:539, SEQ ID NO:540, SEQ ID NO:541, SEQ ID NO:542, SEQ ID NO:543, SEQ ID NO:544, SEQ ID NO:545, SEQ ID NO:546, SEQ ID NO:547, SEQ ID NO:548, SEQ ID NO:549, SEQ ID NO:550, SEQ ID NO:551, SEQ ID NO:552, SEQ ID NO:553, SEQ ID NO:554, SEQ ID NO:555, SEQ ID NO:556, SEQ ID NO:557, SEQ ID NO:558, SEQ ID NO:559, SEQ ID NO:560, SEQ ID NO:561, SEQ ID NO:562, SEQ ID NO:563, SEQ ID NO:564, SEQ ID NO:565, SEQ ID NO:566, SEQ ID NO:567, SEQ ID NO:568, SEQ ID NO:569, SEQ ID NO:570, SEQ ID NO:571, SEQ ID NO:572, SEQ ID NO:573, SEQ ID NO:574, SEQ ID NO:575, SEQ ID NO:576, SEQ ID NO:577, SEQ ID NO:578, SEQ ID NO:579, SEQ ID NO:580, SEQ ID NO:581, SEQ ID NO:582, SEQ ID NO:583, SEQ ID NO:584, SEQ ID NO:585, SEQ ID NO:586, SEQ ID NO:587, SEQ ID NO:588, SEQ ID NO:589, SEQ ID NO:590, SEQ ID NO:591, SEQ ID NO:592, SEQ ID NO:593, SEQ ID NO:594, SEQ ID NO:595, SEQ ID NO:596, SEQ ID NO:597, SEQ ID NO:598, SEQ ID NO:599, SEQ ID NO:600, SEQ ID NO:601, SEQ ID NO:602, SEQ ID NO:603, SEQ ID NO:604, SEQ ID NO:605, SEQ ID NO:606, SEQ ID NO:607, SEQ ID NO:608, SEQ ID NO:609, SEQ ID NO:610, SEQ ID NO:611, SEQ ID NO:612, SEQ ID NO:613, SEQ ID NO:614, SEQ ID NO:615, SEQ ID NO:616, SEQ ID NO:617, SEQ ID NO:618, SEQ ID NO:619, SEQ ID NO:620, SEQ ID NO:621, SEQ ID NO:622, SEQ ID NO:623, SEQ ID NO:624, SEQ ID NO:625;
or to a complement of said sequence.

4. The polynucleotide of any one of claims 1-3, wherein said polynucleotide is operably linked to at least one expression control sequence.

5. A vector comprising the polynucleotide of claim 4.

6. A host cell transformed with a vector comprising the polynucleotide of any one of claims 1-3.

7. A process for producing a protein encoded by the polynucleotide of claim 4, which process comprises:
(a) growing a culture of a host cell in a suitable culture medium, wherein the host cell has been transformed with the polynucleotide of claim 4; and
(b) purifying said protein from the culture.

8. A protein produced according to the process of claim 7.

9. An antibody that specifically binds to the protein of claim 8.

10. A method for detecting the protein of claim 8, comprising contacting a sample suspected of containing the protein with an antibody that specifically binds to the protein, under conditions such that the antibody binds the protein and the protein is detected.

11. A method for detecting the polynucleotide of any one of claims 1-3, comprising contacting a sample suspected of containing the polynucleotide with a polynucleotide reagent that hybridizes to the polynucleotide, under conditions such that the reagent binds the polynucleotide and the polynucleotide is detected.

12. The method of claim 10, wherein the sample is a biological sample.

13. The method of claim 12, where the biological sample is isolated from a human.

14. The method of claim 11, wherein the sample is a biological sample.

15. The method of claim 14, where the biological sample is isolated from a human.

16. A method of identifying a compound that modulates the activity of the protein of claim 8, comprising contacting a composition comprising the protein with a test compound and monitoring the effect of the test compound on the activity of the protein, such that a modulatory compound is identified.

17. A method of identifying a compound that modulates the expression of the polynucleotide of any one of claims 1-3, comprising contacting a cell that expresses the polynucleotide with a test compound and determining the effect of the test compound on the expression of the polynucleotide, such that a modulatory compound is identified.

18. A method of identifying a compound that modulates the production of the protein of claim 8, comprising contacting a cell that produces the protein with the test compound and determining the effect of the test compound on the production of the protein, such that a modulatory compound is identified.

19. A method of treating a subject having a disorder characterized by aberrant expression of the polynucleotide of any one of claims 1-3, comprising administering to said subject a therapeutically effective amount of a compound that modulates expression of the polypeptide, such that treatment is effected.

20. A method of treating a subject having a disorder characterized by aberrant production of the protein of claim 8, comprising administering to said subject a therapeutically effective amount of a compound that modulates production of the protein, such that treatment is effected.

21. A method of treating a subject having a disorder characterized by aberrant activity of the protein of claim 8, comprising administering to said subject a therapeutically effective amount of a compound that modulates activity of the protein, such that treatment is effected.

The application's sequence listing, which the Patent Office published only in electronic form, follows.

SEQUENCE LISTING (631 sequences)

SEQ ID NO: 1 - DNA, 827 bp, Homo sapiens
ggaagtcactgcggtgataggtctgtgatggtccctaagtgccagtccatctctgtggagacccctcggtggcctccctatctctgtgggcgatgcctgagggttagggatgtctccaccctgatggggtgtcccagagacattttcccatggcagtcctcctctctgagaccagggctgtcacttttctgccaggggtactgggtccccctcagcaccctccacagcacaggccttccaagtggatgtcccgttgccttattcccccagcccacaaaggcaccctggccttggcctgctgaagtgttaggaagagggtgggtgcctccagacctggggactgagtggggaaaggagttacacccgtgagtggggaatgaggctggtcctgcagcctctccctccgctcagggcttgaaggtcggtggcggagggggtggctctcacagggcccaactctaaagtggaagaaccttgttagaccgagagcttgccatccagccaagctgctcgaggccctgcagtggccttggcaatgtctgtgccacctcctgagccctcccagcatgtcctcacatgctcatgcccacccgctcctccacaagcctagtccatcctgcctgagctccagcccccagcccccactgtgcccagacatgtgtgctcagggtggctttctccctaggaccttctgtgtatatagttagttttataaccctgaatgcccccacccttcccctaagcacacaggggttaaagctgtgtgtccctcccagtggctgtggcagtgacagtgacacccacacccacagtaaagaggagactgt

SEQ ID NO: 2 - DNA, 794 bp, Homo sapiens
ggcaggcaggctggccccggggacttctctctggccctgctccctccgagcgctccgccgttgcccgcctggcccctacggagtccttagccaggatggaggctgttgtgaacttgtaccaagaggtgatgaagcacgcagatccccggatccagggctaccctctgatggggtcccccttgctaatgacctccattctcctgacctacgtgtacttcgttctctcacttgggcctcgcatcatggctaatcggaagcccttccagctccgtggcttcatgattgtctacaacttctcactggtggcactctccctcaggactgcaccttagggcagtgtccgtcagtgccctctccacctacacctgtgaccaaggcttatgtggtcaggactgagcaggggactggccctcccctccccacagctgctctacagggaccacggctttggttcctcacccacttcccccgggcagctccagggatgtggcctcattgctgtctgccactccagagctgggggctaaaagggctgtacagttatttccccctccctgccttaaaacttgggagaggagcactcagggctggccccacaaagggtctcgtggcctttttcctcacacagaagaggtcagcaataatgtcactgtggacccagtctcactcctccaccccacacactgaagcagtagcttctgggccaaaggtcagggtgggcgggggcctgggaatacagcctgtggaggctgcttactcaacttgtgtcttaattaaaagtgacagaggaaacc

SEQ ID NO: 3 - DNA, 1166 bp, Homo sapiens
  misc_feature 1121: n = a,t,g, or c
gtccccactccgtgtttacatctcgttcccgctccgggtctcggtgactggctcctcaagccggagacgcgtgtggtgcggcgcgatgcgggcgccagcgctgtgtgtgctggcggtgcgctgccttagtgcgggggaaagtggagggaacggtcctgcggggcgttctgtccaagaaaaaggactgcagcctcggggagccagggtcccctcgcagacgagctgccaacgccgcggagccatttctgttccaccctaggggaggagtagggggatatcttttaaaagtttaattgcaaaataagtaggttagtaaggccatttgtggttgctgtttcagtaacttcagcagtcaacggagagaagagtggaaaccttactggatgcggacaggagagccagttactgaaagcagatataacgcggatcctgtaaagagtggtgtgtatccaaaaaaaaaaaaaatctgtacaatgtattttaaaacttgtgtgcacaaaactgaagattttcttttttacctagtccaaatgccgtcctagcctgagtcctgctctttataaaaataggcctctttggccagggcccagccttccaggatgtcccctggaccccctctctgggaaaggcggcagagctactggccactgacaagacctttgggccctcgtgctagacaggccttcgaatccacctgctccagcccagagagcaggcccaggccgtgcctcccacaccgcagccgacctcagagcaccctgcctcaactccccctgtcactatgaggggaaatattttaccctgggtgagtcttggctccgcaaggactgtttccattgcacctgtctgcatcctgttggcgtgggctgctgtgacacgtcccagcatcccatcgacttcccggctgggtgtggggtacgtcggggggcgggaacctgccggttctccttggtgcaaaaatctgaccctcggctgccctgcaaggggggggggcctgacccagaatggggctcggccaacacccctgttcctggggctcctgctccccactccggctaaactcaactgatcatccctctgctgactgctcactgctgctgccacttccagggaaaccactngcggctgtccttgttttttgaacaatttaatttttgcttttgccg

SEQ ID NO: 4 - DNA, 731 bp, Homo sapiens
gcccaccgagcccacgcccacccggaactcgtgctggcccacgagcaccgcgcacagccctggttcctgcccgtgactctccctccacacctccccgcaagcagagggagccagctccggcctcggccaacccagagaggggctcccacagtgcagcggtgggctgaagggctccgcaagtgtggccagagtgggcgccaagagcaagcgagggctgccagcacggtgtcacctctcaaaatgacttagaatgtatacctgtcatacaaccagtttagcttgcttttctaaaatgtttttaattttcaaaataatgtttaaagaagccttactgaagttgattgtaaaaaatttcaaacttttaagtgttgctagggaaattgaactgaaaacatatctgattattttactcaaactagtgaacagggtttaaataaagagggtggaggctgggtgtggtggctcatgtctgtaatcccagcactttgggaggcccaggtgggcggatcacctgaggtcgggggtttgagaccagcctgaccaacatggagaaatcctgtctcccctaaaaatacaaaaaattaaccaggcatggtggcacatgcctgtaatcccagctactcggtaggctgaggcaggagaattgcttgaacctgggaggcagaggctgtggtgagctgagatcgtgccatcgcactccagcctaggcaacaagagtggaactctgtctc

SEQ ID NO: 5 - DNA, 441 bp, Homo sapiens
gctgtgtgtgcgacgcgggtcggaggggcagtcgggggaaccgcgaagaagccgaggagcccggagccccgcgtgacgctcctctctcagtccaaaagcggcttttggttcggcgcagagagacccgggggtctagcttttcctcgaaaagcgccgccctgcccttggccccgagaacagacaaagagcaccgcaggccgatcacgctgggggcgctgaggccggccatggtcatggaagtgggcaccctggacgctggaggcctgcgggcgctgctgggggagcgagcggcgcaatgcctgctgctggactgccgctccttcttcgctttcaacgccggccacatcgccggctctgtcaacgtgcgcttcagcaccatcgtgcggcgccgggccaagggcgccatgggcctggagcacatcgtgcccaacgccgagctcc

SEQ ID NO: 6 - DNA, 455 bp, Homo sapiens
ggcccggcggccgaccatggtgctgccgcccccggaccggcgccacgtgtgcctgaccacgctggtgatcatgggcagcatggccgtcatggacgcgtacctggtggagcagaaccagggcccgcgcaagatcggcgtgtgcatcatcgtgctggtgggcgacgtgtgcttcctgctggtgctgcgctacgtggccgtgtgggtgggcgccgaggtgcgcacggccaagcgcggctacgccatgatcctgtggttcctttacatcttcgtgctggagatcaagctctacttcatcttccagaactacaaggcggcgcggcgcggcgcggcggaccccgtggcgcgcaaggcgctgacgctgctgctgtctgtgtgtgtgcccggcctgttcctgctgctcgtggcgctggaccgcatggagtacgtgcgcaccttccgcaagcgcgaggacctgc

SEQ ID NO: 7 - DNA, 407 bp, Homo sapiens
gccaatcacaggcaggaagatgaaggttctgtgggctgcgttgctggtcacattcctggcaggatgccaggccaaggtggagcaagcggtggagacagagccggagcccgagctgcgccagcagaccgagtggcagagcggccagcgctgggaactggcactgggtcgcttttgggattacctgcgctgggtgcagacactgtctgagcaggtgcaggaggagctgctcagctcccaggtcacccaggaactgagggcgctgatggacgagaccatgaaggagttgaaggcctacaaatcggaactggaggaacaactgaccccggtggcggaggagacgcgggcacggctgtccaaggagctgcaggcggcgcaggcccggctgggcgcggacatggaggacgtgt

SEQ ID NO: 8 - DNA, 604 bp, Homo sapiens
aattaaactagaaatccacaacctcggaagaagtgtttcgagtttaacatgcgctgtttctgcttatgtggttccttctctagagctgctttcccatggctttcaaaacatcaggttattgtggggcttcaggtgtaaggtcctggaagttcagcaaagtttcgtggacaagacatgggcacagagagtagaagcagaaataaatggttctatgttttcaacttccagggttggggcaggccagagcaaggcggtctcatcgaggtgggtgctacctgtgtgtgtgtagatgagtgtgctgaaggtggggagggcagcacacagcagctcatggcagagccgcctcctaagtcttggcaaagaggcaagctgacgatagacatctacctatattgttaagaaaggggtcggggggatcagccaaggtccatcattgcttttttgccgcgccccccccccccgcccccatagattgtcagctgtaagtgaaactcctagtgaaaaagaggggagccctgtgttaggagtccccataaacatgtactgtaattctttgtatatagaaaaaaaatttactgtaaagtaaagtttaacttttactcgt

SEQ ID NO: 9 - DNA, 656 bp, Homo sapiens
attcatcctccaatttccctgaggagcctcagtgagataatggtggagtcagaggagctagaacctctcttccccctttctctgttggagacagggtagcagaagaatgggggacaggggaggctgcagggccatctttggagaaccgattgctaaatccttcttaggaccttaaggtagcctcctctccaggcttgttctccctcttggaatatggggaggactggaggacctctaaggtcccttggttctccccagtccttagattaaaaggcccaggccccaggctggccccctgcctgctgtcccactccttcattccatttcttggaatgtggccatgcctccagtgcctccattcaaccccctctaactgattccttccatcctctgcgaccagagacgccgcccgcctcctgcccaccacctccagaagctcctggctggggtgcactgccgtctcctcccactccccacattgccatgcctgggccacgcccaccccacccactcacccacccccagtgtccgttgtgtgacctagtgcaccatgtattagcttccatggcccccaccccagcccccaccacaccccctttccccacccctttcccctcggcgacttcacctttttttgccgcgataaacgccatctc

SEQ ID NO: 10 - DNA, 801 bp, Homo sapiens
gtccgacctgctggtcaacgtctacatcaacctcaacaagctctgcctcacggtgtaccagctgcatgccctgcagcccaactccaccaagaacttccgcccagctgggggcgcggtgctgcatagccctggggccatgttcgagtggggctctcagcgcctggaggtgagccacgtgcacaaagtggagtgcgtgatcccctggctcaacgacgccctggtctacttcaccgtctccctgcagctctgccagcagctcaaggacaagatctccgtgttctccagctactggagctacagacccttctgatcacagcacccaggagcttgtctccaggaaggcggccccgtcccctactcatacccaccacagagcaccagccagtgccaacgccaggctgctatttatctccctatcccaccccctaccccacctaacacatttgcactgccgggaatggacactggaagtgccaggaggaaggaaggctggtttggtggggtagtggggaggtcagggaggcggggccaagggtgtcccacattcccaacaccgccctctgatcaccatgggaatctttggactcaggacagggccaggcgcagggctctccctcctctccccttcgctgtcccctccccctggagggcatggtgtcggggggtggcactgagctatgagtcccggggatggtgaggaacgccacagacagagccaccctaggagtgagtatagtgctggtgactgtgtttcatagccccagtccagggctgtctaagaaataaagatcatcagactcc

SEQ ID NO: 11 - DNA, 658 bp, Homo sapiens
gggatgcctgtgcgtggtgcctgggtctagggaagctccagccccaggatggggctgccctgcacaccggtgcccgccacatgccaaccctcacctccccgaggactggatgatgtgctgccacgtgtgactcgtctcccttgtctgccctgtgtgaccctcagtcttggccagccatgcatgcgcccgaagctcgtgcagtttgtacgtgaggtgctctcctccctgccaccatgctcatcactctggccttggccatgctccctggtcaccccacttcccggtcgccgtctgcagcactcctggagcagcctgggcccttcagcccctgtgctcgtcccaccctagggactcagccacttgcagaacaggatgggaccgagatttcagcgagccctcctggcgcccggtcctccctgtgggcaccagccctcttggtagctggtgtggagggccggtgtccttggctgccacggagggatttgatcaccgaagcagccacctgctgtagttggacctgaggtcagaggcggggcatcagaggctcaaggtgctgagaagccaccgggaaagcagccagcacaaagggcccaggaagccagcccccgagagctgagcgtgggggtctttgagtgtctttctccaagctgagacgtgg

SEQ ID NO: 12 - DNA, 574 bp, Homo sapiens
tcagaacagaccctgtgcctggccccagtgtgcccaggcaattccccaggccctcattgggagcccttggtgttctgagcagcagggcccaggcagcacatgagcagtgcccaggggctccctgcgtgaggacggcaaggtgcgatgtatgtctaacttattgatggcaggcagccccctgtgccccctaagcctggccctggttattgctgagctctgtgctcagtgctgcggcctggccgtggctcgtctgttcctttggggggcccgggcgggttgtgggaatcagtcttcacagacagacgtgagccaggcggaggactcgttccttgcagaggtcagtcctcacctgcaggtgtcggggtgggggggggcaaggaggggcaggcacacaccatgtctgacctgaacccgattctggggagcatcttcccgctccggccccacgacctccacagggttacattgtaatatatatgccccagctaacctgtctgatggtggcatcttcctgcagacatttcaaacatgtaacttttatatgaaaaaaaataaacacagatgaaagctgccc

SEQ ID NO: 13 - DNA, 589 bp, Homo sapiens
tttactgaatgtaaattatacctcaagaatgttaaagaacaaaacagacacccaggcacctagacactgcccagccttgctcccttacgggtgccacaacagctcaggggctttcaaatctggttttcagctctctctctgtttttggcctctagggatttctcttaacattcccctgagcttacccagcagtgtaaaggatatctgttataatttgtggaacatttctgggtgcttatagtaggtgggtttccaggtaatctcatctacctttctagtggaaacgtaagtgaattaagaaattttcaggccgggcgaggtggctcgctcctgtaatcccagcactttgggaggccggggcgggtggatcacgaggtcaggagatcaacaccatcctggctaacacagtgaagccccgtctctgctgaaaatacaagggattggctgggcgtggtggggggcgcctgtggtcgcagctattcggagggctgaggcgggagaatggcgtgagcccgggaggcggagcttgcggagggccgagattgcgccattgcgctccggcctgggagacagagcgggactccgtctc

SEQ ID NO: 14 - DNA, 779 bp, Homo sapiens
tcagtatttcaccgtctccactgtattatcactaactgccgtgtttgaaccggttgtatgttgtggagggccgagccacaggactcgcgtagactcggtaccctcagtacgtgttggctgaattcagttgcagtgactgacttggtcctccaattgttatttgctgtccagacacagaggcgcctgcaggacattggtgcccctgggctcaggcacccggtttcccggtagggagggcggaccgggccgcagaaagcgcgtcagccgggtgtgtgccctggctggaccgaggggtttcctccgctcagtcggcagggaccctcgctgaggtgcgaggacacatggctgactctgaactcgcagcttcagggaaaccttccagcagtttctccaccgcggctctcacgttccccgtggcgcagcttcttcgtatcaccaatggctcggacacgcgggcgccacccctctcttgcccttgtcgttgttcttccttttgttgggaatgttctttcttcccttccacctgaggatccctcggcttccaggcccagttcagatgccccctcttctaggaagccttccagagtcctctcttctgggtttttacataaaatattaaaacttccccataggcctttgaaaaaaattcatctatttgaagtgcagagtcacatttttgtgaggcgaatgaactaatgggggtgagtctgatgcagagagggaactcgaacccagtgtgtcagacgcccgtgatcagtgtgatcagtgatggtgggtgt

SEQ ID NO: 15 - DNA, 415 bp, Homo sapiens
ctggctgggagcagaaggcagcctcggtctctgggcggcggcggcggcccactctgccctggccgcgctgtgtggtgaccgcaggcccgagacatgagggcggcccgtgctctgctgcccctgctgctgcaggcctgctggacagccgcgcaggatgagccggagaccccgagggccgtggccttccaggactgccccgtggacctgttctttgtgctggacacctctgagagcgtggccctgaggctgaagccctacggggccctcgtggacaaagtcaagtccttcaccaagcgcttcatcgacaacctgagggacaggtactaccgctgtgaccgaaacctggtgtggaacgcaggcgcgctgcactacagtgacgaggtggagatcatccaaggcctcacgcgcatgcctg

SEQ ID NO: 16 - DNA, 436 bp, Homo sapiens
  misc_feature 29,36: n = a,t,g, or c
gccaaagagcctatttttttttttttttnttttttnttttttgggagaaggagccaatgcaatggctagtctttactggaaagaagaaactttacagcacattttgagtaatttagtgcaggtgctcagtgtgccagctgctggggcaccagcttgtaatgggctccacagcgggggcatcgctgggcctcgcctttgtgcagccaaaaccagacgacgctggtattgtcctcttcacagatgcagcctactattctcttgttggagatggaggggactaaattagggtcttccctggtgcctgaagctccctttggggccagtacattgtatgggtccagtcccttctttgcagccagcatgatctccctctccaacccaagtcgcctgctcttcatcagtgggaacaccacctccagatgccatggagcccatc

SEQ ID NO: 17 - DNA, 743 bp, Homo sapiens
aaattgccatggtgggaatatttacactccagaaatcagtaagtgctattaatcagggctttctttttccctgagagccagttgttaaacatttaccagaataccactgtttgggggaaccccaggagggttgaccatggagattggtgcatttggtgagttgctccgtggcctctgggatgggttgggcccagcagtgtcgaatggctgtgttcaggccatctcctgcaaagcagtccccaggccaccggcagggagactcaccataggaaggccccctgtgttggaggtggtgtaggttaatgctctcgccctctcttcctccttctcccctcagaccgaagccaggacagcacagccgtagcactctcagactctagctcaacgcaggacttctttaatgagcccaccagcttactggaaggctccaggaaatcctacacagagaagaggctgcccattctcagttcccaagcaggagcgaggctggggtagggaggccgactgagcaggcgagcgagccacagcaggcaggagggagcgtcgcgcggcgcagaggagcgccggggcagggccgcggcggaaccacagccggagaggggcagcccgagccgggcgccgcagggtccccacccccacccggccggacagtgcccggtgttcccccgtgcggggggcggcggcggcggctgacgggaccgccgggaccgcgggggtgttgccacctccaccgaggagccggc

SEQ ID NO: 18 - DNA, 785 bp, Homo sapiens
cttcccctctgggatcaggtgaggggtccagacagctgaccagacagcttgacagctggtcaagacggtcacgggagctctaggtgggcacaaccaacccctctcctgggaggcccctgccccactggggataggagcctgtgtccctggtgctaagcactctcttcacttgggccattgttggtgggggctcctttccggccagaccacaaggccagaagcaataatggcacctcagcagttccagtatggataggggttcctgttttactagcttttacatctttttatttaaaacaaaacaacacaaaaaaacaatgtgcccccagatgtcagaatgaggcgactagggcaccatactcactttccagggctgggggaagggggacgcaggatcatcccctcccaaggagatctgtgggggtcccaccgtccatctggacttctcagcctgtttggctagaactcaggcctggagtctgggtctgccccctccccggctccttggggctctctggtctcaggccagctggcgatgggtggctagagtgatgaactcaagccctgtggccacagttctgggagccttcaaccctggctcatgctgccatagtctccacggtgcccttcacagagggcttggtagtggcagaatggccatgcccaggtgtgtgttgagaccattgacaactgctcgtgtacaggcaccccacagccccagagcatggggcacagcaggcatgcgagtgagaggatgaaggggaataaagtcagtacaactcgtg

SEQ ID NO: 19 - DNA, 434 bp, Homo sapiens
  misc_feature 416: n = a,t,g, or c
ggtaaactgaaggtaattgaatagaatacgcctgcatttaccagccccagcaacacaaagaatttttaatcacacggatctcaaattcacaaatgttaacatggataagtgatcatggtgtgcgagtggtcaattgagtagtacagtggaacctgttaaatgcataacctaattttcctgggactgccatattttcttttaactggaaatttttatgtgagttttccttttggtgcatggaactgtggttgccaaggtatttaaaagggctttcctgcctccttctctttgatttatttaatttgatttgggctataaaatatcatttttcaggtttattcttttagcaggtgtagtttaaacgaactccactgaactggtgggacgcctgttgttactgaatgtgttggtgactnaataaaaaacgagcgagc

SEQ ID NO: 20 - DNA, 920 bp, Homo sapiens
gggatgctttgaacgtgggggggctgcgtcacagttggactcccacttgcagaggacctgattatgtccagtgaccacctgaacaacagcacactgaaggaggctcagttcaaagacctgttcttaaaaaaagcggagctggagttcgcccaaatcatcatcatcgtcgtggtggtcacggtgatggtggtggtcatcgtctgcctgctgaaccactacaaagtctccacgcggtccttcatcaaccgcccgaaccagagccggaggcgggaggacgggctgccgcaggaagggtgcctgtggccttcagacagcgccgcaccgcggctgggcgcctcggagatcatgcatgccccgcggtccagggacaggttcacagcgccgtccttcatccagagggatcgcttcagccgcttccagcccacctacccctatgtgcagcacgagattgatcttcctcccaccatctccctgtccgacggtgaagagccacctccttaccaggggccctgcaccctgcagctccgggaccctgaacagcagatggaactcaaccgagagtccgtgagggccccacccaaccgaaccatatttgacagtgatttaatagacattgctatgtatagcgggggtccatgcccacccagcagcaactcgggcatcagtgcaagcacctgcagcagtaacgggaggatggaggggccaccccccacatacagcgaggtgatgggccaccacccaggcgcctctttcctccatcaccagcgcagcaacgcacacaggggcagcagactgcagtttcagcagaacaatgcagagagcacaatagtacccatcaaaggcaaagataggaagcctgggaacctggtctgattccttccaacgtgcacttcagctggagaaagaaaccaagaagggaa

SEQ ID NO: 21 - DNA, 757 bp, Homo sapiens
ggcccagtcactatgtagtggaggggcagacaccctcccgcaaattctggaaggttcttagtctcgactagggcagtagccccaggactcctagtcgccggcttcaggtcactgccggctgaacggagctgccgtcgccatgtttggctgcttggtggcggggaggctggtgcaaacagctgcacagcaagtggcagaggataaatttgtttttgacttacctgattatgaaagtatcaaccatgttgtggtttttatgctgggaacaatcccatttcctgagggaatgggaggatctgtctacttttcttatcctgattcaaatggaatgccagtatggcaactcctaggatttgtcacgaatgggaagccaagtgccatcttcaaaatttcaggtcttaaatctggagaaggaagccaacatccttttggagccatgaatattgtccgaactccatctgttgctcagattggaatttcagtggaattattagacagtatggctcagcagactcctgtaggtaatgctgctgtatcctcagttgactcattcactcagttcacacaaaagatgttggacaatttctacaattttgcttcatcatttgctgtctctcaggcccagatgacaccaagcccatctgaaatgttcattccggcaaatgtggttctgaaatggtatgaaaactttcaaagacgactagcacagaaccctctcttttggaaaacataatttgaataaaataatttttaatgg

SEQ ID NO: 22 - DNA, 386 bp, Homo sapiens
cagagcttcagcccagcacagaagcaagacaaaatcagtggctcttagagtttagaaaacaagacagactctcagatgaaagatctgacaagcaccgtggccagtcacagggagagacttgatgtctggccttttaattcctcctctgccagggtgggtcctgggacctctaatgtgggcatgtcgtccaccccaggacgagccatcagggacagaccccccacccccaaggctgcagccacaccatgtttcaggcttggggctggggcaggcttgggctcaatcctgggcacccaggggcagcccacccctaacctggctcctacccaccttgcccttgaaggatgggctgctgcacgtctccctcctccaccccataccacacc

SEQ ID NO: 23 - DNA, 622 bp, Homo sapiens
tttttttttttttttttccttaaaagtgcaaatggcttttattgagggcctactgtgtgctgggcaacatgtctgcaagggtcctgctttacctccctgtactttgcaccggccagggaggagggtgctggggagacccaaacatcaagctgggggagggtgctgaggtggaggtagaagggggcagaggggcccctcagctgagtccttagggagggaagggatcctggggtctgcccagcttgaaacagaagctgggggccacaaggccctgaatcaggccaggcagggtacaggggcctgggagtcctgctcctttgctgtgagacctttagggaatgggatccatctctgagtggtttctcccgatgaaagacaggtccagagggcagagtggccatgcccaaggtggtggccaggtctgacaggatctgcagtccctgccaacaacctcctcctctgctctctgggcagtagtggcctgctcctggacactgctttgcagtcatcacctggacctagagctcatctcggggctggggttggaggctgtgcccgctgctgccagtcaggtccaggcggggctgcgcagggtcttttgggagccgctccagctgatgag

SEQ ID NO: 24 - DNA, 514 bp, Homo sapiens
  misc_feature 59,489: n = a,t,g, or c
ccactattgtgggcaatgttacttgaagtatttttaactagaatttttaagaagaaatncatttcccgtaaggctcagtacccaagacatgcatatacctgaatgaaaagtttcccacaacaagatttactcttgccattttctagtactgtgggattttttccttttcttttccccctgcaggaggggatgctgctgggggctgaggacaatgctaaacctggatgtctcgaggacaggggatggggtttttgtgtcatctatgttctgatgctttttcatttaatacgagaacaggtttcctatgatttggcacactgggacattcgacatgtgtttgttgaatgaaaaaaagaaaaaagagaaatgctaacaatttgttgaatagtccataaaaaagcaaagctggcctggcgcggtggctcacacctgtaccagcactttgagaggccaaggcagacgaggtcacgtgtttgagaccagcctggnccacatggtgaaaccgctctccact

SEQ ID NO: 25 - DNA, 884 bp, Homo sapiens
  misc_feature 435: n = a,t,g, or c
cccgaccgcgtcctgcagcagctgccagtggagccgcctgacaaggactgccatccaccatggtgaagctgggctgcagcttctctgggaagccaggtaaagaccctggggaccaggatggggctgccatggacagtgtgcctctgatcagccccttggacatcagccagctccagccgccactccctgaccaggtggtcatcaagacacagacagaataccagctgtcctccccagaccagcagaatttccctgacctggagggccagaggctgaactgcagccacccagaggaagggcgcaggctgcccaccgcacggatgatcgccttcgccatggcgctactgggctgcgtgctgatcatgtacaaggccatctggtacgaccagttcacctgccccgacggcttcctgctgcggcacaagatctgcacgncgctgaccctggagatgtactacacggagatggaccccgagcgccaccgcagcatcctggcggccatcggggcctacccgctgagccgcaagcacggcacggagacgccggcggcctgggggggacggctaccgcgcagcaaggaggagcgcaaggggcccacccaggctggggcggcggcggcggccaccgaaccccccgggaagccgtcggccaaggcggagaaggaggcggcgcggaaggcggccgggagcgcggcgcccccgcccgcgcagtgacgtctccagccctttagcccggcccgggcgtcctccgccagctcctgtgaccagcgcgtctcccgatgctctccgccgtgttcgtgtccccaggagccctcgctgcagccccgcccccgtgggttcttggactctgtcgcttttctctaagtaaagatttcacgtccaccg

SEQ ID NO: 26 - DNA, 408 bp, Homo sapiens
gtaccaaccagcctgggaaaccgaggggcgtggggatggcccagtccccttaggagagcccgtccgcaggaatgggcccctaggaaagctccaggtgggtttgtctctttgctcccttcctcgatgaacctcaaagctctggcagatgtgccctggagtcacggggggaagaatacctggtttggtgaccagctcctgcccggaaggtccagggctcagtccgctgctgccactctgatggcctcccggaatcgcagctcccccaagaggggcgtctttctcctgctccgcatccccgtccttcccggtgtcgccagggccgccccgcagcagccaaacgaaaagtgctccggccagaccccctccaaccagcagggcggaccagacggcgcccatggctgagaggcc

SEQ ID NO: 27 - DNA, 483 bp, Homo sapiens
gtggtcttggcatccacgccaatgagaatgtgagggcggggcctgaatagactcaggaaatggcgacggccgcgggtctgtgagcagcgggggcggggcctggttgtggcccctccttctcccgtccccaagttccctgggtgggaacggggtcttggggtccctggctgggtggccagaccccgaagccagcgctgggaagggctgcggatgcccgggtcagaagaaagggcaggtccaaagacacgcgggtctggtcctgggcaagaaccgcccctctccgggcctgcttcagtcttcctttgcagaacaacgggcaaggcccttccctctgccccgggtgcttgaagtctagccccatcctggtccaatgcgctcttggtagcctcctttcccagctgccggccggcggccatgcggcccttactgcccctgcgcgtgtgccgggtgtggccccgcaaccctccctcccggctcctagga

SEQ ID NO: 28 - DNA, 652 bp, Homo sapiens
tgaacttaccgccactcaggtaatgaggagccgtgggtgcagccagccttggagatgccgaagagacgggacatcctagcgatcgtcctcatcgtgctgccctggactctgctcatcactgtctggcaccagagcaccctcgcacccctgctcgcggtacataaggatgagggcagtgacccccgacgcgaaacgccgcccggcgccgaccccagggagtactgcacgtctgaccgcgacatcgtggaggtggtgcgcaccgagtacgtgtacacgcggcccccgccatggtccgacacgctgcccaccatccacgtggtgacgcccacctacagccgcccggtgcagaaggccgagctgacgcgcatggccaacacgctgctgcacgtgcccaacctccactggctggtggtggaggatgcgccgcgccggacgccgctgaccgcgcgcctgctgcgcgacaccggcctcaactacacgcacctgcacgtggagacgccccgcaactacaagctgcgcggagacgcccgcgacccacgcatcccgcggggcaccatgcagcgcaacctggccctgcgctggctgcgcgagaccttcccgcgcaactccagccagcctggcgtggtctacttcgccgacgacgacaacacat

SEQ ID NO: 29 - DNA, 510 bp, Homo sapiens
gccctggtcctgcggcagctgtcacccctaccatccataccactgtgctgaccgctcagcctgaagagcagagaatgccatgggtgggactgtgggggtcggatcgtggggttgttggcagagggcaaccctgggccccacaccgtgtggacaggcagacaccagattgtccaggagcaggagctgctgggactgcgctggccccggacctagtgggccttctcctggctgctgagatgtcgtctgtgactggcctggctggagggggagtgttgacaacccaaagctgttctccagtctggggagggagaggcagggtccccaatgtccgagctgcatctggacgctgctcttaaaggacctcctggggcaggggagcggtagggtctggactgggcagatgctgtatgacctccctgagcacccgtgactgccccatgctttcccctttgtgctctgtgtgtgtctgggctgtgcccgggggcttcacaaataaagtcgtgtggcagc

SEQ ID NO: 30 - DNA, 743 bp, Homo sapiens
gcccagtcggcccggcccgggggccatggagctccgagcggcggatcgcgagcctcctgcgaaccccagcctgcacgcccggttagcattcggccgggagatgcggcagtggaatctggaagggcggtgaaaaacctacgtcctgccctcgcccggcctctccattcgtcccccgggtagagaggtgcccggctcccaccccttcccagccccagccctggagacagcagcccctagactactgagggacagcgacagcatgaaggctccgggtcggctcgtgctcatcatcctgtgctccgtggtcttctctgccgtctacatcctcctgtgctgctgggccggcctgcccctctgcctggccacctgcctggaccaccacttccccacaggctccaggcccactgtgccgggacccctgcacttcagtggatatagcagtgtgccagatgggaagccgctggtccgcgagccctgccgcagctgtgccgtggtgtccagctccggccaaatgctgggctcaggcctgggtgctgagatcgacagtgccgagtgcgtgttccgcatgaaccaggcgcccaccgtgggctttgaggcggatgtgggccagcgcagcaccctgcgtgtcgtctcacacacaagcgtgccgctgctgctgcgcaactattcacactacttccagaaggcccgagacacactctacatggtgtggggccagggcaggcacatggaccgggtgctcg

SEQ ID NO: 31 - DNA, 790 bp, Homo sapiens
ctcagatataaaggaaaggtactggcttgaagtcacaaccacgacaggagtaaggatttggaataaggatttggtcctgttttctggaccaaatccttactctggctctgcttacactttctctccatcaccaaatccttactccaaatccagaagtcagagccaactcccatcttggttctgacccaaatcctgctctggactctggagaggagattgaaatataattgcaccctcatacacatttaggaaatggttaagaagtgtaaactgaacccttatccttgtcttcaatcttcctccctgtagacatctatcttattatggttattattcagaaaacccagggatacaggtttgtcttcttactttgataactcttcttagtttaaaataataattaataacacatctttggtcatctatgtcacacaaaaattttcctttgtttgcggggggctggggatgcagtgttttttggggggtcttggtttatgctccctgcccttgagcccctcagccgtttgccctgcccccacctcggctccatggtgggggggggctctggtcttttctaaggtgggcggtttgtcttttgatctttcccttttggatgtgcgtgtgtctgcgtgtgccatgtgcgtggcacgcttatgagtgtgtgtgcgtgtgaacggctttgggtcctgctggttttgctgtgggctgcagtgttctgtgggtctgtggtatctgacactgtggacattaatgttcttcttgggcttttttataaattttttaacagttc

SEQ ID NO: 32 - DNA, 652 bp, Homo sapiens
tgggattacaggcataaaccaccgacttttcttattttttaaatggtagggcagtatgcacataggtattaatttttaatcaacttttttgagggataattagagacagtaaaaggggcccattttaactgttgtctgatttaaatattaacacggttcaggtcagcacattagtttgtctttatatagatgttagaacaaagtttctcatgctgtttctgtttaagtgaaaatttccctgagattgcaaagcaaaccgttaccactgtagccacttatttgttgtgcatcaagatttttttcagtattatgcaattaagttaaaatagagacataggtgttgaggtaaatgttaagactataccttgccgggcgcggtggctcacacctgtaatcccagcactttgtggggctggggcgggcagatcgcgaggtcaggagatcgggactatcctggccaacacggtgaggccccctctctactaaaaatataaaaaattacccgtgcatggttgcgggcgcctgtggtcccggctactcaggaggctgaggcaggagaattatgtgaacccgggaggcggcccttgccgtgagccaagatcgcgtcactgcactccagcctgggtgacagagcaagactctgtctctttgc

SEQ ID NO: 33 - DNA, 827 bp, Homo sapiens
cgccgatctgctgttcagtgacccctcccagagtgaccctgagaccaaagacttctggctcaacatggcagctctgaccgaagccctgcagcgccaggcagagcagaaccccactgcctcctactacaacgtggtgctgctgcgataccagttctcccgcccgggtccccagtctgtgcctctgcagctcagtgcccactggcagtgtggagccaccctcacccaggtctcagtggagtacggctaccggcccggtgccacggctgtgcccacaccactcacgaacgtccagatcctgctgcctgtgggggagcctgtgaccaacgtccgcttgcagccggctgccacctggaacctggaggagaagcggctcacttggaggcttccagatgtgtccgaggcaggcggttctggccgcctctctgccagctgggagccgctctcagggcccagcacacccagccccgtggctgcacagttcaccagcgaggggaccactctgtcgggcgtggacttggaactggtgggcagcggttaccgcatgtcgctggtgaagaggaggtttgccacagggatgtacctggtgagctgctgaacccgcaaatgctgctgccccagctctacactgcgccctggtgctggctgaccaccccctgccctcctgccggaccctggggcctcccaccccagcctccctgaggcccatactccacggagaggagccccatgcccagcctggctgagcccgagattcgctcctccccctcatgccaaccccacacaggtcccggccttttaatgttctttgaataaacactttattttct

SEQ ID NO: 34 - DNA, 689 bp, Homo sapiens
gtctgttttcccagtatcctgagatctcatcatggtgaatttccattccgacttatacctgacaatctttaatcatgtatcttgttgcacaggaatgacttcccctgttctcttacaactggcacacagtgacttctcattcaagactcagttcaaagatctctttctgtgggaaacattacctggcaatactgccatctgtatagtgtagaaacaactgcttctcaggataacaattctcaaatattcaggtatataaaatcatgtgagtagatcattaaaaaaatgtatatcctcaggttccatccccagacactaattcagaaggaatgagatgaagtcaaagaatctgcatttttaactaatgaagcgaataattcttatacagtcccaagatcatactttgaaaagctctacattaggagaaaatgtaaaatttgtatcaagaattactttagaataactcagttggcacagtgtgtgtggcattaaaactagatttactaagaaagaaaattaagcattcacctcttgaaatctcaaaatgccaattaggttttcacctttaatcacatttctctatataactccctctccacagagcagtcagagagatctattaaaatatcaaccagatctcctgcctaaaaccctctaatagctttgtattacaattagaaaaaaaaaag

SEQ ID NO: 35 - DNA, 627 bp, Homo sapiens
attaatttctgtggttgttacagaataagtctaatcaaggagaagtttctgtttgacgtttgagtgccggctttctgagtagagttaggaaaaccacgtaacgtagcatatgatgtataatagagtatacccgttacttaaaaagaagtctgaaatgttcgttttgtggaaaagaaactagttaaatttactattcctaacccgaatgaaattagcctttgccttattctgtgcatgggtaagtaacttatttctgcactgttttgttgaactttgtggaaacattctttcgagtttgtttttgtcattttcgtaacagtcgtcgaactaggcctcaaaaacatacgtaacgaaaaggcctagcgaggcaaattctgattgatttgaatctatatttttctttaaaaagtcaagggttctatattgtgagtaaattaaatttacatttgagttgtttgttgctaagaggtagtaaatgtaagagagtactggttccttcagtagtgagtatttctcatagtgcagctttatttatctccaggatgtttttgtggctgtatttgattgatatgtgcttcttctgattcttgctaatttccaaccatattgaataaatgtgatcaagcc

SEQ ID NO: 36 - DNA, 595 bp, Homo sapiens
cgctcctgctgctcctctcctctcggggcggcggcggcgggggcgcctgcggctgctgggcgctgactgccggctgcttccctgggctgggcgtcagccgccaccggcagcagcagcaccaccggacggtctttcactaccattcctacagtgattggcaagataccgtttctacctcactctccatgtaccatgccagtgacatcttagctgctagagtgtggagctggcctgtgggagtcaagtattggtgatgtgacctgttcacgcaggggaaacttgaacattcgcagtcatgcactgcaaaacgacattggagactgggcctggtggctcacgccggtaatcccagcactttgggaggccgaggcgggtggatcacgacatcaggagatcgagaccatcctggcttaagacggtgaagccctgtctctactaaaaataccaaaaattggtcgggcgtggtggcgggcgcctgtggtcccggctactggggaggctgaggcgggagaatggcgtgaacccgggaggcggagcttgtagtgagccgagatcactgccctccagcctgggcgacagagcaagactccgtctc

SEQ ID NO: 37 - DNA, 702 bp, Homo sapiens
ctcctccacccgcccaggagagccccacctcctccacccctgcctctcctccacccctgcctcccctccacctgccccagtgcccagaccaaccaaggccctgacagccctgccttctgccctctgccctgcatgggcaggcatttgttccctacctgggtggcctgctcccctgcctgggccctgacttcagctccctgtagtgaagtccaggagggtgggacaggcctgtcaggctctgggaatctcccaaatcccagaactcaccactcaccatgggcctttaaatgcagtaaactccacctaaccagattcaggggcactatgcccactgcctcctcttcagactctttgcattcagtgaagagcctggaagaaacccaggggcctcctatgcacagatcttgcagcccagaaccaagtcagcctccctgcgactgcccaggcacactgcccaccaccccacccccgaaacaatgccagcccgctgctttttctatcctcccagtcacctttgcagacaaagaccaggggcagctcccgagggcactgtgaaggctcccatgccacacagtgagaactgtagcctctgcgtccaaggcacacagggtactttctggacccactgctggacagacttgaaggtgtcatgcccggtgtgtgcaggaggaaactaacagttcagtaaactctgccttgacc

SEQ ID NO: 38 - DNA, 719 bp, Homo sapiens
gtccaggcctttgcaggaggggccatgggggctgtgaatgggatgcagccccatggtgtccctgataaatccagtgtgcagtctgatgaagtctgggtgggtgtggtctacgggctggcagctaccatgatccaagagggcctgacttgggagggcttccagacagctgaaggctgctaccgtaccgtgtgggagcgcctgggtctggccttccagaccccagaggcatactgccagcagcgagtgttccgctcactggcctacatgcggccactgagcatatgggccatgcagctagccctgcaacagcagcagcacaaaaaggcctcctggccaaaagtcaaacagggcacaggactaaggacagggcctatgtttggaccaaaggaagccatggcaaacctgagcccagagtgagccgtctgaactgtgggagggaagtgctaacagcccagcctccagcctggcctttcctccttcccctctgaacctcctgcaaccctgagccatcaggacaatcataccccttcccttctctccacccaattgtgccagtaaatgggggttgagggtgacctaggcagcattagaatcacttatttatttctttcctcacctgttccctgactgcgtgaaatgttcagggaggtcagttgatttccccaggtacattcatggtgtgacagacacatgggtacaaataaaagacccagaaagcc

SEQ ID NO: 39 - DNA, 463 bp, Homo sapiens
gcctcccatagtgctagaattacaggcctgagctactgcgcttggccccttgcggtacttttggcccaacctcctccatggctggggacgcggaggccgagagagaagtcacttgccctggctctaccttgaagtggttctcagggttggggcgagagtcggggtggggaccgagatgcagctctatcctgtgcccctggtcgcagcaggcagcccagcgcttcgcgtgttctacttggcctgtccgctgccgcctaatgagctcaggtctaggccgagcagagggggcacctggtcggactcggttgggctcgggcggccccgcctccccccgcccgccaggcgggcccttctcgacggcgcggggcgggccctgcgggcgcggggctgaaggcggaaccacgacgggcagagagcacggagccgggaagcccctgggcgcccgtcggagggctatggagca

SEQ ID NO: 40 - DNA, 377 bp, Homo sapiens
caaaaacaaaaaaactataaaaaaagaaagaattaaaaactttcagagaattactatttactttattaacttacggatttattatataaatatatattcacctagcaacatatctctgccgtctctcctgctctcataatgaagacatagccgattctctgcccgggccccttgctgatgctcctccgggtctgcgtcgggcgtgggtctctggggaccctccagaggtggaggtgggctgatggcctggctgcctggtggttgatggttttgctccccctaccttttttttttgagtttattctgattgattttttttcttggtttctggataaaccaccctctggggacaggataataaaacatgtaatattttc

SEQ ID NO: 41 - DNA, 645 bp, Homo sapiens
  misc_feature 640,642,644,645: n = a,t,g, or c
cacgaacagcttactgtagcagagatcaccaatgcttgctttgagccagccaaccagatggtgaaatgtgaccctcgccatggtaaatacatggcttgctgcctgttataccgtggtgacgtggttcccaaagatgtcaatgctgccattgccaccatcaaaaccaagcgtaccatccagtttgtggattggtgccccactggcttcaaggttggcattaattaccagcctcccactgtggtgcctggcggagacctggccaaggtacagagagctgtgtgcatgctgagcaataccacagctgttgccgaggcctgggctcgcctggaccacaagtttgacctgatgtatgccaagcgtgcctttgttcactggtacgtgggtgaggggatggaggaaggcgagttttcagaggcccgtgaggacatggctgcccttgagaaggattatgaggaggttggagcagatagtgctgacggagaggatgagggtgaagagtattaacctgtgtgctgtacttttacactcctttgtcttgttactgtcttatttttgttctgtaaatgtctattgccgtaaattgttaataaaattgatgtttccattttaaatgtcaaaaaaaaaaaaaaaaaaaaaaaananann

SEQ ID NO: 42 - DNA, 900 bp, Homo sapiens
gtcgtcggggtttcctgcttcaacagtgcttggacggaacccggcgctcgttccccaccccggccggccgcccatagccagccctccgtcacctcttcaccgcaccctcggactgccccaaggcccccgccgccgctccagcgccgcgcagcaccgccgccgccgccgcctctccttagtcgccgccatgacgaccgcgtccacctcgcaggtgcgccagaactaccaccaggactcagaggccgccatcaaccgccagatcaacctggagctctacgcctcctacgtttacctgtccatgtcttactactttgaccgcgatgatgtggctttgaagaactttgccaaatactttcttcaccaatctcatgaggagagggaacatgctgagaaactgatgaagctgcagaaccaacgaggtggccgaatcttccttcaggatatcaagaaaccagactgtgatgactgggagagcgggctgaatgcaatggagtgtgcattacatttggaaaaaaatgtaaatcagtcactactggaactgcacaaactggccactgacaaaaatgacccccatttgtgtgacttcattgagacacattacctgaatgagcaggtgaaagccatcaaagaattgggtgaccacgtgaccaacttgcgcaagatgggagcgcccgaatctggcttggcggaatatctctttgacaagcacaccctgggagacagtgataatgaaagctaagcctcgggctaatttccccatagccgtggggtgacttccctggtcaccaaggcagtgcatgcatgttggggtttcctttaccttttctataagttgtaccaaaacatccacttaagttctttgatttgtaccattccttcaaataaagaaatttggtaccc

SEQ ID NO: 43 - DNA, 552 bp, Homo sapiens
ccgacatcgagcagttcttcaacatcggggacagtagctctgggctcatccagaccgcatttctggctgctcctcctgacccggggcctggtgggggtcggggaggccagttattccaccatcgcgcccactctcattgccgacctctttgtggccgaccagcggagccggatgctcagcatcttctactttgccattccggtgggcagtggtctgggctacattgcaggctccaaagtgaaggatatggctggagactggcactgggctctgagggtgagtctggtcttggcctgggggtaggtcagcgacgttctcactgatccctgtttcctacctttggaccccttcccaccgcccatttttcttttaagagacggggtcttgttgtgtcgcccgggctgcagtgcagtggtgcagtcatagctcgctgtagcctggaacgcctgggctgaggtgggagaatcacttgaacccaggaggcggaggttgcagcgggctgagattgtgccactgcactctagcctgggcgacagtgcgagactccttctc

SEQ ID NO: 44 - DNA, 728 bp, Homo sapiens
ataaagatgcctaggagaggctactccaagcctgggtcctggggcagcttctgggccatgctgaccttggtgggcctggtcacccatgcagcacagagagccgatgttggcggggaggcagctggcacctccatcaaccactcccaggcggtgctccagcgcttgcaggagctgctgcggcagggcaacgccagcgatgtggttctgcgggtgcaggctgcgggcaccgatgaggtccgggtattccacgcccaccgcctgctgctgggactgcacagtgagctgttcctggagctgctaagtaaccagagcgaggcggtgctgcaggagccacaggactgcgccgctgtcttcgacaagttcatcaggtacctgtactgcggggagctgaccgtgctgctgacccaggccatccccctgcacagactggccaccaagtacggcgtgtcctccctgcagcgcggcgtggccgactacatgcgcgcgcacctggcgggaggcgcgggcccggcggtgggctggtaccactacgcggtgggcaccggggacgaggccctgcgcgagagctgcctgcagttcctggcctggaacctgtcggccgtggcggccagcaccgagtggggcgccgtgagccccgagctgctctggcagctcctgcaacgctcggacctggtgctgcaggatgaactggagctgttccacgcgctggaggcctggctgggtcgcgc

SEQ ID NO: 45 - DNA, 367 bp, Homo sapiens
cagaaattaagctagtgggtatctgtggttgagtagaaggatagtgactaggagcgggcacacagccccctctgcaagcccagtccgggctggcagggtgtctcagacaggctgctgacaggcatgaagcagagctgtgggacaggtgtccaggggtggccccagggtccatgtgtgtcttcaaccatgctgcgctcttcaccgcaggcttcataccttttgtacttttatacgtggactgcagaccactttgtgggagggcagtgacatatcagcacacagactcgatggctcgtgatattcctggtgacagcctggaggctctcacactcgaggggaagagctgttagttcataaaacctgctgg

SEQ ID NO: 46 - DNA, 664 bp, Homo sapiens
tttaaattattttattgaaggagataagttactcagatattaactggttgtaggcaaagggaataaacatggtgaagtcaggtttgctggtaaaggggagacagtactaaacgccctgcccaacaaatactcagaatccagggttttcatatttctccatggttcaatctctcacaggtcactttccattcaaaggattatggagaccaaataagacaggattctttcaggtatcaacccagagtctttaggtcttctctcagccaaggcatcgagtgaaaatacaatttatttttcggattcctctggaggattaaaaagtttctttcgcattgcaatgccatgctccctgctcttggtcctgttttctacctactcattcttcaggcattttctcaactcccgatcaacattcattacaataaccaaaaaatttcagaatgttgtgatttttgtgacattccttaagcaagttaatcaagacgttgcattcttcagtgtgcaagtgtggagataagtcaggatgcatctttaggagatgaggatggatcacagcagtgcaacccgactcgtggccacaccgggagaactgaagcggcagtagccggcggagacgcccgacccgaaggccggctgctagggagcagacagctgaaccgcttga

SEQ ID NO: 47 - DNA, 839 bp, Homo sapiens
cgcagagtgagggcgggtccgcgcgtcctcagagcccgctggaggctcggagctgctacccgcagacttctcccgcacagggctcgcaaagagcgtgattccgagagcctgagactgacgcccgacctggaaaccagagaagacttccttagcctttcggatcgcacttgaggctggaggcatgagtcctgtgaggcgttggggcagcccctgccttttccccttgcagctcttcagcctctgctgggtgctctcagtggcccagagcaaaacagtccgatacagcaccttcgaggaggatgcccccggcacggtcatcgggaccctggccgaggacctgcatatgaaagtatcgggtgacacaagcttccgcctgatgaagcaattcaacagctctctgctccgggtgcgcgaaggcgacgggcagctgaccgtcggggacgccggcctggaccgcgagcggctgtgtggccaggccccgcagtgcgtgctggccttcgatgtggtcagcttctcgcaggagcagttccggctggtgcacgtggaggtagaggtgagggacgtcaacgaccacgcgccgcgcttccccagggcccagatcccggtagaggtgtccgagggtgcggcagtgggcacgcgcatccccttggaggtgccggtggacgaggacgtgggcgccaacgggctgcagaccgtgcgcctggccgagccgcacagcccctttcgcgtggagctgcagacgcgagcggacggcgctcagtgcgcagacctggtgctgctgcaggagctggaccgcgagagccaggccgcctacagcctggagctggtggcccaggacg

SEQ ID NO: 48 - DNA, 683 bp, Homo sapiens
attgatttcagaggatggactaaatttcctaggatttccattaagaattaagaaaaaagctctaagcacgcagggtagccagacagacatggatatgagatggcactgtgaaaactcgcagaccacagatgacatccttgtggcctcagcagagtgtcccagcgatgatgaggacattgacccctgtgagccgagctcagccaacccaacccgagcaggcggcagagagccgtatccaggctcagcagaagtgatccgggagtccagcagcaccacgggtatggtcgttgggatagtagccgctgccgccctgtgcatccttatcctcctctatgccatgtacaagtacagaaaccgggatgaaggctcataccatgtggacgagagttgaaactacatcagtaactcagcacagtccaatggggctgttgtaaaggagaaacaacccagcagtgcgaaaagctccaacaaaaataagaaaaacaaggataaagagtattatgtctgatcccaagatcttaaatggacacttgtatagaaatagtcttcattttatctgagacataatataaacttatttactttcctttttatgaagcacatacaaaagaagacagagaatgcaatcaggaaggaaagactttttaaaaaataaaaacaagtatctcatgctcttgtttccc

SEQ ID NO: 49 - DNA, 601 bp, Homo sapiens
ttttttttttttttttttttttttttttccacctggctaatttttttgtatttttagtagagacgagggtttcgctatgttcgagaccaggaggctgatctcgaactcctgacctcgtgttccacccacctcggcctcccaaagtgctgggattcctggcgtgagccaccgcgcctggccaggatgcccattttttaaaggctcaactgtcccagtaggccatgccatgtgggcatcgggcagggtcctggccctgcgtcaggaccgctcttcaaagctcgatggtatcactggaggcgctgcgggattccccaggcttgccgcgcggctggacctctccctggccgtccccctgccgagcggcggtagaatcaggggctggggtcggggcaggcagtagctgtaccgtgctgggcaactcatctaggggcagactgtccactgatgacagcccgtggcgccaggggttccaactgatcttgagtgaacccctggagaagctgtcgagggagctgccagaagccgcagcggctgccccgtcgggtgcttcatacgtgctgtgggaccggcccgcgcacgcgcactcgctgagcgacctgca

SEQ ID NO: 50 - DNA, 412 bp, Homo sapiens
gcaaaaaagacccccaataggccgggcgcggttgctcacgcctgcaatcccagcactttgggagaccgaggcgggtggatcacgaggtcaggggatcgagaccatcctggctaacacggtgaaaccccgtctctactaaaaatacaaaatttagccgggcgtggtagcaggcgcctgtagtcccagctgcttgggaggctgcggcaggagaatggtgtgaacccgggaggcggagcttgcagtaagcagagatcgcgccactgcactcccgcctgggtgacagagcgagactctgtctcaaaaaaaaagaccgccccccccaatatacacacaccctgactttaatgagcttattttgctggggactcagccaattaatttcacaaattgtaaaactatttcaagaaatgag

SEQ ID NO: 51 - DNA, 664 bp, Homo sapiens
ctaggactgacccttgtggtgtttttttgggtggtggctggaaacagccctctcccacgtggcagaggctcagcctggctcccttccctggagcggcagggcgtgacggccacagggtctgcccgctgcacgttctgccaaggtggtggtggcgggcgggtaggggtgtgggggccgtcttcctcctgtctctttcctttcaccctagcctgactggaagcagaaaatgaccaaatcagtattttttttaatgaaatattattgctggaggcgtcccaggcaagcctggctgtagtagcgagtgatctggcggggggcgtctcagcaccctccccagggggtgcatctcagccccctctttccgtccttcccgtccagccccagccctgggcctgggctgccgacacctgggccagagcccctgctgtgattggtgctccctgggcctcccgggtggatgaagccaggcgtcgccccctccgggagccctggggtgagccgccggggcccccctgctgccagcctcccccgtccccaacatgcatctcactctgggtgtcttggtcttttattttttgtaagtgtcatttgtataactctaaacgcccatgatagtagcttcaaactggaaatagcgaaataaaataactcagtctgcagcccc

SEQ ID NO: 52 - DNA, 434 bp, Homo sapiens
cagagctgtccgcgggctgggcagcgtcgccgtctcccctgagccgcctcggtccggcaggagcggagccgaagcatcccttgctgcacgcagggcagagcaggcgagggctgggggccgatcggggaccccggcatctggcagtttccttgcaggttcaactttaattgccaagatttcacccctcctcctcaagcccagattatttatcctccctccggcctgggctgctggatgcagcagcggctgggcttggtcccaggagcagggagagtgcgctcccggccctcctagccgcgtgcccgggccatggtgcggctgagccccgcgcttgggtgaggcggcggcgcggctcggagcccggcggaccggtctacgggacatcttcccctgaggaggagtcttcccctggggctgcgtgccgggggcgagcg

SEQ ID NO: 53 - DNA, 879 bp, Homo sapiens
atgtaaggcaagtagtggacatattggaatttggttcagaaatcccaggaacactagggacagatgttgcaccttttctgcttagtgatttttaatcctgttgcaaatgtaattctacaaaaattctttcttagcaattttataagaatgataagcattttcctaaatatgaaaaatgtattgttgattgtacttcaaaatgttattgatttagtataaactgagatttgtaatttaaactctagatgtgtaaattttcaaattataatatagtttaaagcatggttttccaaccttttggcttccctgggccacattggaagcagaattatcttgggccacacataaaatacactaacactaatgataactgatgaactttaaaaaaaatttcataaataatttttatgatagctactgcaacagataagtgaaatgttcttacattcatagcattgggcaccacttgattaaagtatctactcaccttcaagatttcttaaatgcactgtcattaactagcttagaacactgctaagtgtatattattatttcttaataactattatcttatacttttagtaagaagcctactgggggccgggcgcagtcgctcacgcctgtaatcccagcactttgggaggctgaggtgggtggatcacctgaggtcaggagttcgagaccagcctggccaacatggcaaagccccgtctctactaagattgcaaaaattggctgggcgtggtggcaggcacctgtagtcccagctactcgggaggctgaggtgggagaatcgctggacccgggaggccgaggttgcagtgagccgagatggcgccattgcactccagcctgggcaacagagtgagactccgtccc

SEQ ID NO: 54 - DNA, 773 bp, Homo sapiens
gtccggagcctagccgtcgcgtacctaggatgccgcgtggaagccgaagccgcacctcccgcatggcccctccggccagccgggcccctcagatgagagctgcacccaggccagcaccagtcgctcagccaccagcagcggcacccccatctgcagttggctcttctgctgctgcgccccggcagccaggtctgatggcccagatggcaaccactgcagctggcgtggctgtgggctctgctgtggggcacacattgggtcacgccattactgggggcttcagtggaggaagtaatgctgagcctgcgaggcctgacatcacttaccaggagcctcagggaacccagccagcacagcagcagcagccttgcctctatgagatcaaacagtttctggagtgtgcccagaaccagggtgacatcaagctctgtgagggtttcaatgaggtgctgaaacagtgccgacttgcaaacggattggcctaatgaagaagttcaacctggagagatggaaaatcagctctcataactaagttaatttagtataaaaatagaattgatagtgagggtataaagtgtaaccatcagttaaacctctcctgtcattcctagcttccttgcttcagaattgaaatggaagtgggggtgtccctactctgtagaatctgggactgggcaaatgtttgtgtggcctccttaaactagctgttatgttatgattttattctttgtgagttaattagaataaagtcattttcttccaaggtatggttc

SEQ ID NO: 55 - DNA, 596 bp, Homo sapiens
ccaagctggcgtgcagcggcatgatctcggcttactgcaacctctgccaagtgagttaatttacatataaagattaatagtacatgtgatatttggaaatgggagaggaaaaaatcccaacggcatagaatttaggacctgagattgtttccccactcccagcttttgctctgcctattttctttgcctggaattatttttccctactcctaggtgtgattgtcaaaatatgtaacccatattttgggttcatattttggattcatatttggctcagtggctcatgcctgtaatcccagcacttggagaggctgaggtggatggatcatttgagatcaggaaattgagaccagcctgcccagcatggtgagacccccgtctctactagaaatacaaaggttggccgggcgtggtggtgggcgcctgtggtgccagctgcttaggaggctgaggcacgagaatcacttgagcccaggaggcagaggttgtagtgagccgagatggtgccactgcactccagcctgggcaacaaagcaagattccatctctaaataaataaataaatacataaataaataaaaatatttagaagacat

SEQ ID NO: 56 - DNA, 380 bp, Homo sapiens
gaagtccatttgtgttacagcgtttgacttccgcacattttagttagaatgactgtggctgtgagttagacgtcgaagcatatagctccaaagcaccttagccctggcgtctgagctgagtgcagttcctgctcccacgcatgaagcctgttcctgcccggcagcccctcctgcggagctccactctcgaggctgcggcccaggcttgctgcttgtctggctcttcccggtgctgggggtggccgttcagcagcttcccggcaggaccccttgcttagtcctcactccttgcccgctcagagccacctcagctgctccagcactgtctagggggtgtgttcattacccatctggttacttttgttacttatatccttttt

SEQ ID NO: 57 - DNA, 767 bp, Homo sapiens
agtttccatggtgattgtactaatttacagtcccaccaacattttaagtattccctcttctccatatcctcaccagcttttgttttcctttgtctgttttattgtagccattttaactggaataaggtggtatctcattgtggttttggtttgcatttccctcatggttagtaacgttgaacattttttcacgtacctgttggccatttgtatatcttcttttgagaaatgtcttttaaggcagtttgcccattttaaaaatccggttatttggttttttttctcttgttttggctgttgagttgtaagaaaaagttctaatagtggtttctgacctaggagtagggaaaaaatttgtcatcaattctttcccatctttgaaatatgacccctaaatgttcatccttactgtagaagacaacctatgagtgaagtcctctctctcttcttcactcattgggtatattactggtatatcatttagtgtgtcaggatgggcacagtggctcatgcttgtagtcccggcattttgggaggccgaggcgggcggatcgcctggggtcgggggttcgggaccggcctggccggcgtggtgggggcccatttctactaaaactgcaaaacgtagcccggtgtggtggcgcatgcttgtggtcccagctgcttgggaggctggggcgggagagtcgcttgggcccgggaggcggaggttgcagtgagctgagattgcaccactgcactccagcctgggcaacaaactccctctc

SEQ ID NO: 58 - DNA, 358 bp, Homo sapiens
agtacattcacgttctgactgaaggacaaaaggatgagagagcagtctgcgtggctgccgcctgcaacaccgcgagcccggcgcgaggaggagacggtgggcgccgcgcgcaggggccccgctgctgctgctgccgccgctagccagcggggactatgttcctgggctccggagcgtttcccgcagccgcgacccccgctgctcacgccgctgcagcagtccgctggcggcgcggccactgagggcgccgggagccgaagccgcgaactcgctccctccgcacaaagccggagccggcggcgcgccgggggccgggcagcggcgggcggcgacgggcggttgcgcgccgccgggggct

SEQ ID NO: 59 - DNA, 517 bp, Homo sapiens
tgcctggctctgctcccccgccccgagagatgcctccaggcttgggtagatgaagccaggggcttcctgccttcctggaaggcttttccctgtctggagtttatgaaagaccagcaggcaatgcggcaataaaaaagaccttggggtagaggggcgccacgagaggcgggtctggcgctgacatccaaccccgtgccccctccctgcaggatgctggtggactgtgtgcccctggtggaggtggacgacatgatgatcatgggcaagaagcctgaccccaagtgtgtcttcacctatgtgcagtcgctctacaaccacctgcgacgccacgaactgcgcctgcgcggcaagaatgtctagcctgcccgcccgcatggccagccagtggcaagctgccgcccccactctccgggcaccgtctcctgcctgtgcgtccgcccaccactgccctgtctgttgcgacaccctcccccccacatacacacgcagcgttttgataaattattggttttcaacg

SEQ ID NO: 60 - DNA, 386 bp, Homo sapiens
ctgggtttagaccgtcgtgagacaggttagttttaccctactgatgatgtgttgttgccatggtaatcctgctcagtacgagaggaaccgcaggttcagacatttggtgtatgtgcttggctgaggagccaatggggcgaagctaccatctgtgggattatgactgaacgcctctaagtcagaatcccgcccaggcggaacgatacggcagcgccgcggagcctcggttggcctcggatagccggtcccccgcctgtccccgccggcgggccgccccccccctccgcgcgccgcgcgcgcgggagggcgcgtgccccgccgcgcgccgggaccggggtccggtgcggagtgcccttcgtcctgggaaacggggcgcggccggaaag

SEQ ID NO: 61 - DNA, 428 bp, Homo sapiens
cttaaagtacgtccgcgggttgctgcagacagagccccagaacaaccaggccaaggaactggagcggctcattgacaaggccatgaagaaagatggactcgtgggcatggccatcgtgggaggcatggccctgggtgtggcgggactggccggactcatcggacttgcttgtccaagtccaaatcctgaaggagacgcgggagcccacggagaacgctccaggagggcctgtccatcctcgctgtcctttccctgttctccccctgccccccgtctctatcctctgtggccttcagctaatttctgctcccctgagattcgtccttcagccccatcatgtgctttgggatgagtgtaaataaaacggggctgtggcttgggaaaaaaaaaaaaaaaaaaaaaaaaaaaaaaaaaaaaaaaaaaaaaat

SEQ ID NO: 62 - DNA, 557 bp, Homo sapiens
ccaagagctcctcccttgggtggaagaccagggatgtgtatgtgtgcacatctctaaatgtccgagcctggacatatgtgcctgtttctgctggcaatagttatgtaaacacagaagcacttgtctgggcgcaacgatggatcatgttcgtttctgtcaaggttcaggtgtgttcgtgcccctgtgtgtgtcccgtgctccgtggctcctcggtgggaagctgcgttcagcgtgtgccggcgctgggtacaggtgcggacggaaagtacatgtcggcgcctttgtccacgggtgtgcgccgacttgtgtcctggggcgggggatgggtccgtgagcggacgctgccgcgtgggggaaggggcgggtgcgagggcagcccagagcgtgctgggggagatggggcggcgcggagagggcggggaccctcctccccacaacggggccgcgcgcgcctggctcgccgggcgcactcccagcgcggaggaggcagcagcgccgccggcggccgggacgcagcgctcagatcgacgctggaactgaccaccgcgaccgccact

SEQ ID NO: 63 - DNA, 824 bp, Homo sapiens
cccaggctggggtgcagtggtgcggtcgtatctcactgcggcctcaaactcctggactcgggcggtcctcccgcctcggcctcccgagtggctgggactgcaggtgtgtgctgccatgcatggctggttttttaaaaatttttttgtagagatggggtctcgctatgttgcccaggctggtcttgggtttctggcctcgggcggtcttcccgccccggcctcccagggcgctggggttatagatgtgagccaccaggcccgtccaagaaaggagctttaagcacattcagttcttcagacgcctctgttacctgcatcccccaactccaactttcctgcttctccctctccttttcaaagtacatacattgttaaacttcccaagtagtgctgtttttttccccatcttataagaactatttctcattttcttcttcttgcttttttttttcttttcaagacagagtctcactccatcagccaggctggagtgcaggggcgcggtcttggctcaccccaacctctgcctctggggttcgggcggttcttctgccttagcctcccaggtggctgggactgcaggtacgtgccaccacgcctggctaatttttgtatttttagtagagacggggtttcgccgtgttggtcaggctggtctcgggctcctgacctcaggcggtacacccacctcggcctcccaaagtgctggggttacaggcatgtgccaccacgctcaaccagtatttctcattttcttctaataaaccttctagagttccacattagaaagctctagatagaaacattttttaaagagctcaggc

SEQ ID NO: 64 - DNA, 570 bp, Homo sapiens
gcatcttctgtcaaagaaaaatcaaccagaggtctggatttggcaagaaggctaaaaatctggttttcttcccacgcattatgtagaccaattcaacttaagagctaaccattaaataattatcttgagtatcttaggttgtcttataaaataaatttgaagtagatgagtttatactcaatgaaattcattggcgtcacaatgacttttccatcatgtgttaatttcttgtacccttaatatgttattttccaaggacttgaaagaaatggggtaataaataaaagctgcatttctagagaagcctaacaaaaatagaatattaattttctttaaaaaattaaacatttgaaaaatgtaattcacagcattaagtagactgcataggtcctcagtgaaaggaccctgaagaagcatttttttaaaccctcatcatagttagcagtgcaaaacatagacttatcagacaaaaatcaactaaaatgttaattttgaaataaataactaacatagaaaataaaatgaggtcattgttctctactccgtagatcttagagtctgccttagaaa

SEQ ID NO: 65 - DNA, 424 bp, Homo sapiens
ggggtcgcgtctgccgcagcaacggggtgcggcagggtggggaacgcgggagcggggccagctcccaggaaagctggtctgcgagcggcccctgcccggctcccaggtccctgcgcgaccccgcccttcccgagaccccagccgggctgccgcccgcgtcccggaagctccagcctgaaccatgtttttcacttgtggcccaaatgaggccatggtggtctccgggttctgccgaagccccccagtcatggtggctggagggcgtgtctttgtcctgccctgcatccaacagatccagaggatctctctcaacacactgaccctcaatgtcaagagtgaaaaggtttacactcgccatggggtccccatctcagtcactggcattgcccaggtaaaaatccaggggcagaacaaggagatgttg

SEQ ID NO: 66 - DNA, 467 bp, Homo sapiens
caacggcctgagctcccccggagcctcactcgggcctttcctcaggccctcctgtctgctccacgtggggcgccggggcctcgaaccgcccgtcccctccagccgagtttccccacccgccaggccaccgcggcgtcggggtcccatacctgatgctgttgtcgcccctgctggtaaggcttaattggcccctggtggcaacgccgcgtccggatcttgccgccaccgccccctccgactcctccggctcccgaggccatggcggagcctccgccgcttcccgctccggggcgggtaagggggcgggagaggcagaggcggaggccttagagagcctccccggccgccgggcccgggcccaaaagtccgcccgcgctgtccacacagtgggcacaagcaccccaggaaccgcgaggttgcgagcaggagcggagagagggtgagtgctggcagcggggaagggggtg

SEQ ID NO: 67 - DNA, 395 bp, Homo sapiens
gtgggaattgcctttgacctattaaagaaggaaagtgggtaatggagtcccagccactcaagagactggatatcccccgagaatggcttgggttaccagctatggacccttggaagatgaatctaatccttctcactggtttttctttgcaaattcatttgcttttatttttctaataacaataaactctattttccatgttctcagggcccctgggtagacagacacagcttgatttcagagcagacataggcgaagaaaacatggcattgagtgtgctgagtccagacaaatgttatttatatacacatccaaatttgaagagaaaatgtatttctttaggtttcaaacactgtaatagatataaagcaaaaataaaaacctgttgcaaagtt

SEQ ID NO: 68 - DNA, 780 bp, Homo sapiens
ggaaggagacgattggagtcaactcaatgtgctcaaagtaagcgtgagcggagaggatctggagccgcttcagtcgctccctgaagaaaagaagagtcggggacctcctagccagttacattccagaggatgaggcgctgatgcttcgggatggacgctttgcttgtgccatctgcccccatcgaccggtactggacaccctggccatgctgactgcccaccgtgcaggcaagaaacatctgtccagcttgcagcttttctatggcaagaagcagccgggaaaggaaagaaagcagaatccaaaacatcagaatgaattgagaagggaagaaaccaaaactgaggctcctctgctaactcagacacgacttatcacccagagtgctctgcacagagctccccactataacagttgctgccgccggaagtacagaccagaagcccctggtccctctgtctccctttcccctatgccaccctcagaggtcaaactccaaagtgggaagatcagtagggaacctgaacctgcggctggcccacaggccgaggagtcagcaactgtcccaccccctgcacccatgagccccacaagaagacgagccctggaccattatctcacccttcgaagctctggatggatcccagatggacgaggtcgatgggtaaaagatgaaaatgttgagtttgactctgatgaggaggaaccacctgatctccccttggactgataccctttttcccattcattcacaaataaattacaatgggtgctgagaacct

SEQ ID NO: 69 - DNA, 698 bp, Homo sapiens
  misc_feature 307: n = a,t,g, or c
gccgctttttttttttttttttttttttttttttgtgaacggaaacacatttattacaaaaaaaaaaaaccccaaaacgaaaaacaaattcacattgtattgagctacaatatggcagcagattaaaaaaaaatatttttacacagtttaaggtaactcctaacagaacatagccttgttgccacgagacaggacacaggattccaagtactcagtagcggcgagtgaagcgggcatcgctgggcctgctcccccggctctggcctccaaacccgccctgcatgccaccgtgtgggatggggtggcncccgggaggccccgcctggggcaaagctgccgcgccctgacattcctcctcggttcatcatgtggccaggcccggagtgaccggacatgcttctctcgccaccttgccacctcttgtgatccctgtccatcatgcccccgtcggccgtgccctgccatgaccggtcatcctctcttcggccatggtccccccagtcacgtctgcccctggggggaggaggcagcccccggccctcgctcatcctcttgtcagagccatagcccccccagccatcgcgggagtcccggccgtggcgctctggtcctccatggcgttctgggtaatgctgtccttctcgttctcccatcattgaccttgaaccttctctcctgtccaccgagtggtcggggta

SEQ ID NO: 70 - DNA, 567 bp, Homo sapiens
gaaggggcagaccaacgaaaccagatgagaccaacgacaccatgcgagacacgcttgcagacactgttgttttggaaatgtgcttccctccatctgaaatctcatccctccacccgcccactcgggcagctgtgctgtgggcagggcatgcgctcccctggctgagcaccccagagattctcctgcaccttcctcatgccgcacgctgctcatccgtctccatgtgtgtttagatccatgccattcactgactcactaacacctgcaaaatctttaaggaaaaaagctgaagggtacgaccatgcacatatgtgacctggaaaatgcaaatttagatcttttatgatttaattgttattgtttcccatagaagttccctccctttgaaattaatatataatgtataaattctgcactgagccatggcggagctgggcagcccctaggttagagtggagacggaggcccaggcgcaggggtcacacctcatctggtttccttcccatctcacagcttagcttgtgcttctcaacaccaagtctttaagagcaataaaaactacaccac

SEQ ID NO: 71 - DNA, 527 bp, Homo sapiens
cggcccggccgggtggagtcgcggagtagtcctcatggccgccccgccggagcccggtgagcccgaggagaggaagtcccttaagctcctaggatttttagatgttgaaaatactccctgcgcccggcattcaatattgtatggttcattaggatctgttgtggctggctttggacattttttgttcactagtagaattagaagatcatgtgatgttggagtaggagggtttatcttggtgactttgggatgctggtttcattgtaggtataattatgcaaagcaaagaatccaggaaagaattgccagagaagaaattaaaaagaagatattatatgaaggtacccacctcgatcctgaaagaaaacacaacggcagcagcagcaattgaacaatcttgagcatagaagtcaatgtaaacgaagtaagatcaaccacataaaacatttcatgtgcaataagctctcaatcaagtaaataaagtttaagttgtagtcaaaaaaaaaaaaaaaaaaaaaaaaaaaaag

SEQ ID NO: 72 - DNA, 427 bp, Homo sapiens
ggcgaaggaggcagaggcacttatgcttgtcagggtggtggcagcagaatagaaaggatcagatacaacagataacactgaaggaaaaaatctacgacttcagaaagtaaatatttctaaaagaaatagagaagttatgaagcacagattttattgcagcggactggcagtttttactcttagggttggccagctagtaaatttattgcatacctgcgtgtgtctgtggctttcgaactctgaaattgtgcattgactccatgaacaagttaatactgtgagactgccaccctgtggacaaaatatcaggactaaaaccatcaagaattaaagtttcattcatttgcgatttactgttttagaactggctttggttcttccacgttggtgcatgcagtgatgctcattaaatagaaagcttgaaatt

SEQ ID NO: 73 - DNA, 817 bp, Homo sapiens
ggagttcttcccatccgtgtccctgggggaccccacgctggagacgctgctcaggcagtttggactacaggagaaaagcccacctcgcacccgcagcgccaacagcaccctggcccaggccctccactggactcgctctcagctgtctcccctggaggcccccgccctgctctgggggctcctcatggccgtgggggctgtcagatttgtgcaggccctgctagcaccctgttctctccggtcctccccgctggcaccagtcagcggggagaagcgcaggccagcctcccagaaagactccggagctgcctccgaacaggccaccgcagcccccaacccctgctccagtagttcgaggaccacccggcgaaagaagtagctgtgttctcccagctgcacgtcctgagagggccaggtcgccgggagtgctctggcctccggcaggacaggacccagccactgtgccttagctgaccctgcagggccaggcacaggttggggggctgcccctggggtttgcagggtgctgcattgagggctccaggccccacccccacgccagccatgcccctccccaggactcccactattgcctctgtgattggcccaggaggaaaacacgaccaagctcaagacccttcccctgccctgggctgtgggggtctgagtctagagcccccaaccctaggccccgtgccagaggggaagaggctgactcccaggggaagaggggaagcactgtcatcttccacgtcatcttcacaccagcccatcctgccctttagatctgggcaccaataaaggcgtcttttgtgct

SEQ ID NO: 74 - DNA, 511 bp, Homo sapiens
cgccccgagctgcccccgcaggcccacggtctcggcgtagacggtgcctgcaggccctgcagcgacgctgagctgctcctggccgcatgcaccagcgacttcgtaattcacgggatcatccatggggtcacccatgacgtggagctgcaggagtctgtcatcactgtggtggccgcccgtgtcctccgccagacaccgccgctgttccaggcggggcgatccggggaccaggggctgacctccattcgtaccccactgcgctgtggcgtccacccgggcccaggcaccttcctcttcatgggctggagccgctttggggaggcccggctgggctgtgccccacgattccaggagttccgccgtgcctacgaggctgcccgtgctgcccacctccacccctgcgaggtggcgctgcactgaggggctgggtgctggggaggggctggtaggagggagggtgggcccactgctttggaggtgatgggactatcaataagaactctgttcacac

SEQ ID NO: 75 - DNA, 792 bp, Homo sapiens
catatgtgagctacttggttaaatatgagaggcctaagctttagcaaatctgcgacgtaaatttggccatagcaaagccacagaagagcaatgattttcatgttccagcatgttggattgacatcaggttttttcttttcatggcagatgatttacccaggaaaaggttacctcagctgtataaaccgcccactcctgagatgttggcatatcttgattttagtgtctccacaactggcatgcttacaggagtgaaggtaaggtgcatgctggaaaaatgccacatctgccaaaaaaatagagatgaccactgccccagaaactatagatgcagaggccaagtggttgtaccagagaccggtaggcagagtgaagatctaagtcgctgctctatttaaataaaggcattggctcctctggaatgagttatcacaaggaatttgtattattaagcgtctgaacctagcatagaagctgaaagaaaaagagttttagttaaaatatgtatgaaatctgatatttagatatcataaaatgcagtattcgctgggcacggtggctcacgcctgttatcccagctccttgggaggccggggcgggcggatcgcctgaggtcgggagttcgagaccagcctgaacaacatggaaaaccccgtctctactaaaaatagaaaatcagctgggcgtggtggtgcgtgcctgtggtcccagctgctcaggaggctgaggttgcggtgagctgagatcgtgccattgcaccgcagcctgggcaacaggagtgaaactccatct

SEQ ID NO: 76 - DNA, 452 bp, Homo sapiens
gtccggtgcgtcctgttctacagctatggccgggccagctgcagctttccgccgcttgggcgccttgtccggagctgcggccttaggcttcgcttcctacggggcgcacggcgcccaattcccagatgcctacgggaaggagctgtttgacaaggccaacaaacaccacttcttacacagcctggccctgttaggggtgccccattgcagaaagccactctgggctgggttattgctagcttccggaacgaccttattctgcaccagctttttactaccaggctctgagtggagaccccagcatccagactttggcccctgcgggagggaccctgctactcttgggccggcttgccttggctctttgagctcccttttgcttaattactgggttttctgggcagttttttttttaaagagttggagtaagaagaggattaaaaaggaaagac

SEQ ID NO: 77 - DNA, 442 bp, Homo sapiens
aaaaagtcctacttttctgggtccccaggtgcagcacctcccggagactgtttctcccatggcctcctgagtgatgggccctgcctccctgtgcctcatcctcaggctggttggagcagagggtgggcaggagccccagcacagactggggggtgctcacagcagggccaccttgatgcaggctggaatgttatccctggggtgtgcttggaccccacctgctttctttctctcctgcccctcccctactctcactgtaatttatggaccctgcccgcctgcgtgttgtgtgtatgtcctgtgccttttctcactattgtttgggtgtgggagggggtggtttttcactgaaaaggggggtacacctatagctttcttgatgttcaatcaatcagtcactgtgtcccagacatattcaataaacacagattggtaccacccg

SEQ ID NO: 78 - DNA, 704 bp, Homo sapiens
  misc_feature 629,630: n = a,t,g, or c
ggaaatcacctttctggtcttagtctccccatctgaaaatggcataaccaacctacctgcctcaaatacaagaccctgcttgtgaagccggactcctctgcaccaccctcgccaccgacgccggtgcgctagtctccgctcgctcggatgcacttgctgcgcccccgccccgcgcagacccgcggcgggcgcccgcgccggttctgcccacgcacacttgatgctctgcgccttttgggcagcgccacgcaacgactacgcacccgaaccctgcctccggcacccttggccacactcgccacacttacacgcgcgcacttctccagaggacgcacgatgggaaagagagagttgggacccgcagagggggcagggcacatgacccgcgtgccgcccagcagggcagcgtctcctggctcagaacagtgctagaagtgtccagtctagcagctcctggaccaagactccgtggccattcccttcctcctgccttccatccacccccttacggtcagagctccgaaggcagcgtggtgacgggtgcggggaggggagtggggggatctctctgagatacttctgccttggggtcactggatcattcattcgacaaacatccgcgagcaagnnaggaactaggagtcatccttgccacctccctctccctcgctgcctatattaaaatacacctccatttcctgtcg

SEQ ID NO: 79 - DNA, 644 bp, Homo sapiens
caaagaacacgtgaattaatacactccagatatcatctatagtggaccttgatgtcaatctggatctttctggtgttgggctccatccagggttccattttgttattccattctggtcatcccctgctgtatacaaggttctggggacggtggccggcagcactcctggaacaggtcctgcctggggttcccgcctctctctctctctttccttcagcatccagataaagcgggtgatgacctaccgtgacctggacaatgacctcatgaagtactcagccattcagacactggatggggagatcgacctgaaactcctcaccaaagtgctcgcgccggagcacgaagtccgggaggatgatgtcggctgggactgggaccatctgttcactgaggtgtcctcagaggtcctcactgagtgggacccactgcagacggagaaggaggactgcgcgggcaggccaggcacacctgagcccgtcacccatgctctagacatgaagaaatgcaatgagcttaaagctaaagaagcttgtaagcagctccgattttttacctggaatattttgtaataaaaatatttatattcagtcaaccacattggataattcaattgcaataaattgcttattctgtgccatccc

SEQ ID NO: 80 - DNA, 396 bp, Homo sapiens
ctcgccctgctgggcggctggacctgggcaaagcctgggcgcgctcccgcgcagcggcgccatgaagcgctcggggactctgcggctgctctcggacctgagcgccttcggcggcgcggcgcggctccgggagctggtggccggggactcagcggtccgagtccgtggcagtccggacggccgccacttgctgctcctgcgaccccctggggcggtagccccacagctgctagtcgcgtcgcgagggcccggcgcggagctagagcggagcctgccggccggccagccctccccgctggacgccttcttcctgccgtggccagcgcggccggcgctggtgctggtgtgggagagtggcctggccgaggtgtggggcgcgggcgtggggcctggctg

SEQ ID NO: 81 - DNA, 852 bp, Homo sapiens
gttttttttgggtacctctctggcctaaagaacttacatacaagctcacaacccctttctgaaactcttgggcccaggccgggcaccagagctcacacctttaattccagtattttgggaggccgaggcgggaagattgcttgatcccaggcattcgagactagcctgggcaacaaagcgagacctcatctctttttttaaatgaatgaatgaatgaaacccggccccggtgttaatggtctatgtggcccttttcacctcctacattatcctgttcactctcatgcttgctttattgtaggtttccacatgagaccacaagcaacatgagaccagaagtcttatttatcttgtccatggctaagttcccagcacttagaatggagcttggcacacagtaggtgcacaacaaatatctgttgaatagaaagctggaaggaaggacccatgcaccagaggtggtccctgctccagtggggaagataagagatgcataaaaaatataataccacacatttttattgaaaggtttactgactgtatactggatgttcaaagatgggagaggccgggcgcggtggctcatgcctgtcatcccagcactttgcgaggccgaggcaggcggatcacttgaacccaggactcgaaaccagcctgggcaacatagtgggacccccatctctacacaaaaatttttaaaaattagccaggtatggtggctcaccctgtagtcccagccacttgggaggctgaagcaggaggatcatttcagcccaaggtcaaggctgcagtgagctatgtatgtttgtaccactgcactcgagcctgggcaacagaatgagaccctgtctc

SEQ ID NO: 82 - DNA, 651 bp, Homo sapiens
aaagcatccagcagccccctgctccggcccagcatggcgaccccgacccagacccccacaaaggctcctgaggaacctgacccattttactatgactacaacacggtgcagactgtgggcatgactctggcaaccatcttgttcctgctgggtatcctcatcgtcatcagcaagaaggtgaagtgcaggaaggcggactccagcccaacctgcaaatcctgtaagtctgagcttccctcttcagcccctggtggcggcggcgtgtaacaccttcccgaggaaactccgctgccgaccctgcctgagcgcgggagcctgaggaccgggtggaggcggtggggacccagccgcgcgccgggagcgctccccggaatgagccgccccacccaccccaaggctggagccgctgcaccctgctgtccctctccaggccttggcaatgacgatcccccaaagagcccgtctgcaccccagacccagggcctcaggcctccagctcctgggatccgggagtccatcccggcccagcacccccagcatccccgtgtatggcccccctgcacctccttgtctcatccccgaagatccgtccccctggcccctcagtgtccatgtcttgagcttaataaatgtgcatttggttttttccac

SEQ ID NO: 83 - DNA, 892 bp, Homo sapiens
  misc_feature 465,466: n = a,t,g, or c
cttagaaagcggcctgggtggcgcggtcgagtcatcgcagggcctcaccgcttcgttctcccgtccctccccgcgccttggcgcgggggtcgactagccaagtgaggcgggaggcgactcggacctttccctgcatttcgtttcggccagtgccgggggctacccgccctggggcctgggatccttggggcccgtgaggcccacatcttagacggccggggcctaccgcggcccgccgctggccctcatgaggcatagactgaccaagctgctggcagcctcgggcagcaactccccaacccgcagtgagagcccggagccggctgcaacttgttcgctgccctctgacctgacccgggctgcagcgggggaggaggagacggcggcggccggatctcccggccgcaagcagcagtttggcgacgaaggagagttggaagccgggagggggagccgcggcggcgnntggccgtgcgcgcgccctcccccgaggagatggaggaggaggcgatcgccagcctcccgggggaagagacggaggatatggactttctgtctgggctggaactggcggatctcctggacccccaggcaaccgcactggcacctggaccccgggcttagctcgccgggccctctctcctcgtctggcggaggctcggatagcggcggcctgtggagaggggacgtatgacgatgaggccgcggctgctgaaatgcagcgcttctctgacctgctgcaaaggctgttaaacggtatcggaggtgcagcagcagcatgtgacagtggcagcgccgaaaagaggcggagaaagtccccaggaggaggcggcggtggcggcagcggtaacgacaacaaccaggcggcgacaaagagtccccggaagcggcg

SEQ ID NO: 84 - DNA, 469 bp, Homo sapiens
cgcagagcccggcccgacgccgccatgagcgccgcgctcttcagcctggacggcccggcgcgcggcgccctggcctgcggagcctgcgcccttctacgaaccgggccgggcgggcaagccgggccgcggggccgagccaggggccctaggcgagccaggcgccgccgcccccgccatgtacgacgacgagagcgccatcgacttcagcgcctacatcgactccatggccgccgtgcccaccctggagctgtgccacgacgagctcttcgccgacctcttcaacagcaatcacaaggcgggcggcgcggggcccctggagcttcttcccggcggccccgcgcgccccttgggcccgggccctgccgctccccgcctgctcaagcgcgagcccgactggggcgacggcgacgcgcccggctcgctgttgcccgcgcaggtggccgcgtgcgcacagaccgtggtgagcttg

SEQ ID NO: 85 - DNA, 791 bp, Homo sapiens
  misc_feature 566,604,734,779: n = a,t,g, or c
cactggctgtgttcagtagcaatgggcttatgctgaaacagattcagtacactgcatatggggaaatctattttgactctaatattgactttcaactggtaattggatttcatggtggcctgtatgacccactcaccaaattaatccactttggagaaagagattatgacattttggcaggacggtggacaacacctgacatagaaatctggaaaagaattgggaaggacccagctccttttaacttgtacatgtttaggaataacaaccctgcaagcaaaatccatgacgtgaaagattacatcacagatgttaacagctggctggtgacatttggtttccatctgcacaatgctatttctggatttcctgttcccaaatttgatttaacagaaccttcttacgaacttgtgaagagtcagcagtgggatgatataccgtccatcttcggagtccagcagcaagtggcgcggcaggccaaggtcttcctgtcgctggggaagatggccgaggtgcaggtgagccggcgccgggccgcggcgcgcagtcctggctgtggttcgccncggtcaagtcgctgatcggcaagggcgtcatgctggcngtcagccagggccgcgtgcagaccaacgtgctcaacatcgccaacgaggactgcatcaaggtggcggccgtgctcaacaacgccttctacctggagaacctgcacttcaccatcgagggcaaggacacgnactacttcatcaagaccaccacggccgagagcgacctgggcacgntgcggttgatca

SEQ ID NO: 86 - DNA, 770 bp, Homo sapiens
tgaacattgatcaatactctaaaatgtttgtcatcctttagaataatgggaattaaagttgagcagttttccatctctaccaaatccttcaccacaagcagcattctattacagtatgaagaattgtctcatatgttaaaactgtacttttctctaacctttctctcactcctacaaggcccttttctcaaatcatatttctgagagaaatgtatggttctttctcacaggcctgctgatttgtaactgtgccatcgaatagagcaattagatccatcagacctttttcccctcattaggttcagtggaaccattctggttaaaacagcatgaactgaactcagtttacattcatattctatgggcaataccatttggtttttggaactgtttatctgctgttccctatcaagtattaatgtagggatgtcactcaggctgcgttgcactgggctgagttcaactgcgacgctctcactgacgcgtgcttacatgtgcttctcacttccggagcacaggcaggtggctgcggggtcccagctctgaatggatgcccatgatgcaactggggcagcccttgctttttgcttgctctcccacagaaacctttgtccttgcaactttatcctttgtcccgattgggtcccagatacacaaaatgtacaaatgtaaacttgctcattttattaaaattcttttagttctttgttctttctgtaattttttaaaataaaaattgccttgatggagtgatggttttcactcgcacc

SEQ ID NO: 87 - DNA, 800 bp, Homo sapiens
gggagagctgctcttgcaagccccggaggctgtcgtgggcctcagccagcaccagctgcagctccttgatctcagaggcataggaatcattgtcttcagctcggtaaggcctgaagctccggctggggtcgggcttagagtccaagtcaccagtgcggaaagcctctcggatcctgggctcccattccggcaggtccctgaagtcaggtggctgaaagtctgagccaaggtcttttgccagaagaatctccttagagagcccctgggagcccaaggggggcagtgatgagaaggactcctgctgttccttgacagagcacccgaggactgcatctgccttccgcgtgaaggcattcagctcctgctgcagcacgctcaggcgcaccaggatggcatggatgagcttggtgtccctggggccctcgctgttgtcgggggcctcatgcagccggaagtcagcacactcgttgtccagacacagccggaggccagccgtgaagccattggcatcagccaccaggacatcgatggccttactgaccagggcggcctgctctctcagcccaggcagcacctcggcctccctggctctgcagagtcggaccgcatgggactcgtgtgtctcgcccaggggagcaggcacacactgggcagagtccccggcctcggcgtccgtctccagcatgggccgcgtactctggcaggaggcgaggtcacagcgctggaggttggagaggagcacgcggttctcgtactgcagcttcttgaccttgccgctgagctcgccgatctgcagcttg

SEQ ID NO: 88 - DNA, 861 bp, Homo sapiens
agagacgggcagagggcagagggcggagcggcgccggagcgggcgtcatggcgcggctcctctggttgcaccggggcctgaccctcggaactgcgcctcggcgggcggtgcggggccaagcgggcggcggcgggcccggcaccgggccgggactgggggaggcagggtctcttgcaacgtgtgagctgcctcttgccaagagtgagtggcaaaagaaactaaccccggagcagttctacgtcacaagagaaaagggaacggaaccgcctttcagtgggatctacctgaataacaaggaagcaggaatgtatcattgcgtgtgctgcgacagtccactcttcagttctgagaaaaagtactgctctggcactgggtggccttcgttttccgaggctcatggtacgtctggctctgatgaaagccacacagggatcctgagacgtctggatacctcgttaggatcagctcgcacagaggttgtctgcaagcagtgtgaagctcatctaggtcacgtgtttcctgatggacctgggcccaatggtcagaggttttgcatcaacagtgtggctttgaagttcaaaccaaggaaacactgaccatcttcaagagtcccgttcccttgccaccccttcacgtgcaccctcaatttccacaattcacttgaatgacttgttttatttgcaataaaactgggctgaatttgctgctgtctccagcgagtcattgcttctcttaatttatttacctggaatcaacttaatcctgtgtgttaggctgttcttgtgttgctataaagaagtacctgatcaggatctgggagaatttgaaaaaaaaagaaaaactagaaaaataaacaaaatt

SEQ ID NO: 89 - DNA, 636 bp, Homo sapiens
ggatgattgctccagcccactctgctgccacctgggatccaacatgttcaaacccagctgtgaacttcacagagtattaaaagaaagagcctttgcttcagcagtttatgttattaagacggaggcttgggtcatgttatctctctccaccaatgtgtaaggtgaaagtcctattaggtaagagtttttggaagacccgtgttttgtgctttttgggtttcagtatagggttttttcctacagggctagagggaaagtaccccagcatttccaaccagtggggtgcaaaattatttgggtctacagctttacctattcctttcaagaacatttttgaaaaaacacatctgttaagttgaaccatgtgtaactgctgaatgctgatgtttggccgttttctacttaaaaaaataggccagcagtttgtaaattcaagctaatatatgaactttttgaaaaagttgttcttggacactaaaaggtaagacggacgccagatttccagagcaaggggaggagagacccgagcaacatcacttccctgaagacctagctcctgcgcgcggccggggactgtgactccacatgccggcgttacttacccgggcccgcgcctgactcgccacacctcatttt

SEQ ID NO: 90 - DNA, 827 bp, Homo sapiens
ctgactacgaggacgtgatagagatcatctcagacgaatcagtggaagaagagggcattgaggaaggcatccagcaagatgaggacatctatgaggaaggaaactatgaggaggaaggaagtgaagatgtctgggaagaaggggaagattcggacgactctgacctagaggatgtgcttcaggtcccaaacggttgggccaatccggggaagagggggaaaccggataagggttttccccttttggggatcacctctctgtatcccccacccactatcccatttgccctcctcctcagctagggccacgcggccccacattgcacttctggggggtgaccgacttcgtacacgggtttaaagtttatttttatggtttagtcattgcagagttcttattttggggggagggaaagggggctagtccccttcttttggccctccgcccccgcaggcttctgtgtgctgctaactgtatttattgtgatgccttggtcagggcccctctacccacttctcccagtcagttgtggccccagcccctctccctgtgctgtgtggagtggacaccctgacccccgaagcgggagggccgctgtggccttcgtcacagccgcgcagtgcccatggaggcgctgctgccaccttcctctcccaagttctttctccatccctctcctcttcccgccgcgccgctagcccgcctcggtgtctatgcaaggccgttcgccattgcggtattctttgcggtattcttgcccccgccccccagaaggctcgcctccccccgtggaccctgttaatcccaataaaattctgagcaagtcc

SEQ ID NO: 91 - DNA, 672 bp, Homo sapiens
tttttttttgagacggagtctcgctctgtcgcccaggctggagtgcagtggcgggatctcggctcactgcaagctccgcctcccgggttcacgccattctcctgcctcagcctcccaagtagctgggactacaggcgcccgccactacgcctgaataatttttgtatatttagtatagacagggttttgccatgttggccgggctggtctcaaactcctgaccttgggcgatctgcccacttcggcctctcaaagtgctgggattacaggcctgagccattgcgcccatccaggggctggatcttgacatggaccgtatgcctccagaattctctccccggtcaaggctgaaatttactcctggctacactcactcacgtttactcatgctcacgcactagaaattaactgcaagattggctgaagttcatttgtaacctggtcaggcccaggatggcactggccccttcaccaaagggaacaataattcaagataagctgttggagtggattgcaccactgacccctcctagcccccttcctctccattccaaacccctctctctttaaaaacccctgcattccccccacaaattgaagggtggaaatttttggaaagaatctcacccactccttcccttattagcatggataataaaatctccttatcgc

SEQ ID NO: 92 - DNA, 435 bp, Homo sapiens
aaaaatcgcaaagagagagaccccagagcacagtggctcagggcccaagtgctgtttacacagaacctgacccaggatttctatttttaaaatattcactattaaagaaataaaataaggcagagacaataatgcctagcagatggttgtcttgaggatgtcagccgtgagcgaatgcctggcacctagtaagtgctcagtagctggtgaaatattattaatgctggttgttttctttttccgcatctttgccgcctcctgtcctttctatttttctattttccaccccttccgcccccgccctcctgcctttcgctcctcatcgccttgcactgccatcttcccacccactcccctcaccccctggcgccctggccgcccctccgctgccgtgggtgcagctggagttcgtggactacgtgttccacggggagc

SEQ ID NO: 93 - DNA, 829 bp, Homo sapiens
  misc_feature 794: n = a,t,g, or c
ccagagtaagaaatgctgaatttttgaagtgtaggtccacacagaatacttacatctgcattgtggatttacctcagtctacaaatgcaactgacttgtggagactgttttttatcttcggaatttagaagtgattagcaatattagtgtcattaacctctaattttaataggctgttatagatagaagatgtacatctcaaatggatgcatggtgtcttggaaggaccttggagtgttgagatgacgtgggatatttgtgttctctgtagaaaaggtactttgtggactatcggagagtgcttgtctgtggaggaaacggaggcgctggggcaagctgcttccacagtgagccccgcaaggagtttggaggccctgatggaggggacgtatgcaagcttttgacacgtcattctgagaggcaggtgccctggggcagtgcagcggggttgattatttgcccctagactgcatgtgcatttgaactaaaaacctgatgtatgggcaggcacagtggcttatgcctgtgatcccagcacttggagaggctgaggcaggaggatcacttgagcccataagttcaagaccagcctgaacaatatagcaagaccatgtcttttttgtttgtttgtttttttgtttttttgttttgcctcaaggtttgtggatctacaaaaaatttttgaaaaaattagccagacatggtagcgtgcacctgtggtcccagctactcaggaggattgctggatcccagaagttcaaggctgcagtgaatcgtgatcaccccactgcttnttccagcatgggtgacagagcaataccctatctct

SEQ ID NO: 94 - DNA, 336 bp, Homo sapiens
gtccctgctgggctgccgttccagctggactgccgccatggaactcagcgccgaatacctccgcgagaagctgcagcgggacctggaggcggagcatgtggaggtggaggacacgaccctcaaccgttgctcctgtagcttccgagtcctggtggtgtcggccaagttcgaggggaaaccgctgcttcagagacacaggctggtgaacgcgtgcctagcagaagagctcccgcacatccatgcctttgaacagaaaaccctgaccccagaccagtgggcacgtgagcgacagaaatgagggactgggatctgcacagccattaaattataaatctg

SEQ ID NO: 95 - DNA, 542 bp, Homo sapiens
ggcctccccagaggactggggagctggtgagggcctgagcagtccacactggccagagctgggtgggttgcaggtggatgggccccgggcagcacagtcctgggcaccatgccctgtttgtgaggactgttagagccccagatgggcgttccccaggtggtgggtgcagcgggcccagagcccagttttacagggatagtagtaattgggttgggcaccttgaacctctctcccgagtgggcccttttctggactttaaccctctctgcagtgccgcatggcagacagcagagcctgggggtggatgggagagggggctgctgagagctgacccacccgccccatttcagagctgcgccctggtttcgccggacagagttggtgtttggagcccgactgccttggggcacacggctgcctgtcgaatgttggtgtctgcctcgttccctcccctggtgcctgggtctgcagaaaaacaagaccagatgtgatttgttaaaaaaaaaaaaaaaaaaaaaaaaaaaaaacaagatgacgacaac

SEQ ID NO: 96 - DNA, 443 bp, Homo sapiens
ctttcacctcgcggccgtaggctaacgtggaagtcggaccagccggccggcggaagaacctagagcgcgctgcctggcgagtcaggcgcgcggggcggcgttggtggtcttcgcggcgtaactcggcctttcctgggagggagtgatggggcgcaccggggccggggagcgggcgccagtgtagcccgcgcggcgcctggcccggagcgcggcggctgcggcggcggcggcggcgggcgctggaggcctgtgagagccgcagcccggagcgcccggcttcccacgccatggcccccattggcatccccctttccccactgggggtggcagtgttttgcctgctggggctcggcgtgctctaccacctctactcgggcttcttggccggccgcttcagcctcttcggcctgggcggcgagcctggcggcggcgcggcggggccc

SEQ ID NO: 97 - DNA, 835 bp, Homo sapiens
cttgcgctccccagccgcaagtcggccgcgctttgcccgtcagcgcttggagctttttgcgtcgcttcccgctgcgcctgcgcggtcccgcctcgccccacgcgcgggctcgcgcttcggtttccccagacctgctcgcagcaccctgctgtcttcccggtccggcccgctgcccgcggcgccagcaccatgctcttctattcttttttcaagtcccttgtgggcaaggatgtggtcgtggaactaaagaatgacctgagcatctgtggaaccctccattctgtggatcagtatctcaacatcaaactaactgacatcagtgtcacagaccctgagaaataccctcacatgttatcagtgaagaactgcttcattcggggctcagtggtccgatacgtgcagctgccagcagatgaggtcgacacacagttgctacaggatgcggcaaggaaggaagccctgcagcagaaacagtgatggctcctcctcctcttcccctccctctttcattggtgacccataaccccaagtcccagcccagaacccctaacccccaatacttgaaggggttttgtttttttactaatgatggttttgtgggttttttttaagggatgagtggatgagaggagtaatagggaacagctatcctctcttgagaaggggaggataagtaggctgggaaacttcaaagccttcccagtccccagcacctgcctttctcactacttctctggagatggtaggagagtttcctaggtctttccagggcagcatgtgattcatttggggatggaaggaatctgtcccgcatcgggaataaaatttatgatgc

SEQ ID NO: 98 - DNA, 630 bp, Homo sapiens
caaaggcaccttccagccaccctgatcttggtggagaaactgacgcaaagaggagtgatgaaagatgtggccatttgggccccattctggctccctaggaaggttactacaccctccctgcagccttggcgaccccagatcagcggtgaagaggagtggcccggccctggaagaatgcggctctgacaaggggacagaacccagcgcagtctccccacggtttaagcagcactagtgaagcccaggcaacccaaccgtgcctgtctcggaccccgcacccaaaccactggaggtcctgatcgatctgcccaccggagcctccgggcttcgacatgctggaggagccccggccgcggcctccgccctcgggcctcgcgggtctcctgttcctggcgttgtgcagtcgggctctaagcaatgagattctgggcctgaagttgcctggcgagccgccgctgacggccaacaccgtgtgcttgacgctgtccggcctgagcaagcggcagctaggcctgtgcctgcgcaaccccgacgtgacggcgtccgcgcttcagggtctgcacatcgcggtccacgagtgtcagcaccagctgcgcgaccagcgctggaactgctccgcgcttgagggcg

SEQ ID NO: 99 - DNA, 856 bp, Homo sapiens
  misc_feature 106,112: n = a,t,g, or c
gccgccgcccaggaaggggatgcggaaacccctggctcggtggagcggagaggcaggcggggtgaggggcgttgccaggcaaagggcgagcgccgtggctgggganccgatnacggcatgtcccaagccccgggagcacaaccgagcccacccaccgtgtaccacgaacggcagcgcctggagctgtgtgctgtccacgccctcaacaacgttctgcagcagcagctctttaaccaggaggctgccgatgagatctgcaagaggttggccccagactcccggctgaaccctcatcgcagcctcctgggcaccggcaactatgatgtcaatgtgatcatggccgctctgcaggggctgggcctggccgccgtgtggtgggacaggaggaggcccctgtcccagctggccctgccccaggtactgggctgatcctgaacctgccctcgcccgtgtcgctggggctgctgtcactgccgctgcgccggcggcactgggtggccctgcgccaggtggacggtgtctactacaacctggactccaagctgcgggcgcccgaggccctgggggatgaggacggagtcagggccttcctggcggctgcgctggcccagggcctgtgcgaggtgctgctggtagtgaccaaggaggtggaggagaagggcagctggctgcggacagactgaccatggctgaccatcggcgcccacaggcagtccctgcgcatccccctccggtgcgcacactgcatgcctgggaaaggccagcacttcatggaccctggggaggccccgccccctccccacacccctgctccccactgccgctgctgcctcaataaatctgctgatttgctgcc

SEQ ID NO: 100 - DNA, 893 bp, Homo sapiens
cgcatcgtcgtcctccccgaccgcgtcctgcagcagctgccagtggagccgcctgacaaggactgccatccaccatggtgaagctgggctgcagcttctctgggaagccaggtaaagaccctggggaccaggatggggctgccatggacagtgtgcctctgatcagccccttggacatcagccagctccagccgccactccctgaccaggtggtcatcaagacacagacagaataccagctgtcctccccagaccagcagaatttccctgacctggagggccagaggctgaactgcagccacccagaggaagggcgcaggctgcccaccgcacggatgatcgccttcgccatggcgctactgggctgcgtgctgatcatgtacaaggccatctggtacgaccagttcacctgccccgacggcttcctgctgcggcacaagatctgcacgccgctgaccctggagatgtactacacggagatggaccccgagcgccaccgcagcatcctggcggccatcggggcctacccgctgagccgcaagcacggcacggagacgccggcggcctggggggacggtaccgcgcagccaaggaggagcgcaaggggcccacccagggtggggcggcggcggcggccaccgaaccccccgggaagccgtcggccaaggcggagaaggaggcggcgcggaaggcggccgggagcgcggcgcccccgcccgcgcagtgacgtctccagccccgcagcccggcccgggcgtcctccgccagctcctgtgaccagcgcgtctcccgatgctctccgccgtgttcgtgtccccaggcgccctcgctgcagccccgcccccgtgggtctctgactctgtcgcttttctctaagtaaagatttcacgtcc

SEQ ID NO: 101 - DNA, 767 bp, Homo sapiens
ctcaaagtgggaaggttttgggggagggggaaatacagggatggtccatgttttcaagagtaggggaatgatgtttaaacacaaaaataaattttttttcatttccagaaacactatttatttatggtttttttttttaattttttctttttgggggtgaaattggcagatgcctgaggtcatagctgtgtcctgggtcactgtggctggtgaggacctcaaggaccccatcaagtgtacacagcagcagcaaaatcaagggatgaccctcctctggggccccctgtcctcagcacattccaggcagctgtgccctgacccacagggacccgtggggatgggaggaggtccaggcctgtgttgccagagctggcagtgtgagctgtaggcagggacggggagggactgtcgctgtgatcagagtgggttaagctgaccaggaacacccatttaacccctttttctttttgctttcatttttataaaggaaaagaggacctgtcagataggcagccccatgctacgtgattctttatgttgtgttgttttgttttgtaaattgtataatttttaaatatctgagttttaaaaaaagaaaaaagtacaaaaaaatcttgttttggccttaagaaggggttagtgcatctttcaggggtcactctgccatggggataaaatagctgtttcacaaacagttttatttaaaaaaacaaaaaacaaaaaaaatcaaaaaaatcaaaaaaataataaacttcattttaacctcg

SEQ ID NO: 102 - DNA, 713 bp, Homo sapiens
tttttttttagaaaaaaaaaatccattacatttattaataatatatcttagattctcatcctgttcttttaaatggcgcccactggtctcatacagaggagctgtgtgactttctggaattatagaaatatccgcatccagccatgtgctgagcagaccaatgtaaaatgttcagcaggttttccaatgtctcttggatatatttaatcatctctgcagaagaactcaaaatctcagagcagctccactccagatccagggcaggaggcagcctccagggagggaggctgcgtttacgagaatctgccttttgtgtgtgcctggctgggaccagcctctgggaaagagaagcaccaagacgtgaacagggctgtgggccgatggctttagcagccacataatccctcctttgatgtccagggtcagttcgagcctggtcccccaggctaggaggagacgaatgaaagaatcttgctgtggtctttcctcgttaaaataacatttcggccaccacctgggctgaggacctatccatctgctccttggtccgctcgaagcacctacgggcgagctgctgctgtctggcgtcctcactcaccatcagctccccgtagaggtacacacccatggccacgcggagagcctgtgtggcattacagacacgggactcctgccccgcaaagtgtgtccctaggagtagctggtcttagaaa

SEQ ID NO: 103 - DNA, 478 bp, Homo sapiens
ggcgcgtgcgcgggcggtcgctacctgcggccgagccagggagcgagagggcgcagagggcagcgggcttgggcagcatgaggcccggaggggagcggcccgtggaagggggcgcgtgcaatggccgctccgagctggagctactgaagctgcgctcggcggagtgcatcgacgaggcggccgagcggctgggggccctgagccgcgcgatctggagccagcccgagctggcctacgaggagcaccatgcccaccgcgtgctgacgcacttcttcgagcgggagccgcccgcggcctcctgggcagtgcagccgcactaccagctgcccacggccttccgcgccgagtgggagccgccggaggcccgggcaccgagcgccacgccacgcccgctgcacctgggcttcctctgcgagtacgacgcgctgcccggcatcggccacgctgcggccacaacctcatcgctgaggtcggggcg

SEQ ID NO: 104 - DNA, 686 bp, Homo sapiens
tgcctgggcccgcttgccctggagtgtaagtgctgggtaaataagaaccgcctggcgcaggctgtgtctactcttcacgccgccttctcagatcgggctgcatgtccccactccgtgtttacatctcgttcccgctccgggtctcggtgactggctcctcaagccggagacgcgtgtggtgcggcgcgatgcgggcgccagcgctgtgtgtgctggcggtgcgctgccttagtgcgggggaaagtggagggaacggtcctgcggggcgttctgtccaagaaaaaggactgcagcctcggggagccagggtcccctcgcagacgagctgccaacgccgcggagccatttctgttccaccctaggggaggagtagggggatatcttttaaaagtttaattgcaaaataagtaggttagtaaggccatttgtggttgctgtttcagtaacttcagcagtcaacggagagaagagtggaaaccttactggatgcggacaggagagccagttactgaaagcagatataacgcggatcctgtaaagagtggtgtgtatccaaaaaaaaaaaaatctgtacaatgtattttaaaacttgtgtgcacaaaactgaagattttcttttttacctagtccaaatgccgtcctagcctgagtcctgctctttataaaaataaaataaaaagaatttg

SEQ ID NO: 105 - DNA, 808 bp, Homo sapiens
ctttctgctgcccgcgttgttggcgctggctgcgctggcagccgccccagcagggccccggctggcattggtggccgcggtgctggtgctcgtggcttcggcgctgcgatccgcctacatgcttaccgacccttacggctcgcaggcgcggctgggcgttcgcgggggcctggtgctctacaacctgcccttccccttgctgcttacggcgctggcagccctgactctgctcggcctgggcgcggggctgccgccaccgctgcaaaacccactcctgctgggagcaatggcgctggtgcatggtgtaaggttgctcgcgacagacctgctgtccacatggtctgtgctcaacctcctgaccagggcttgtcttgcgctctggctgtacccgggcccaggccgcgtgggcgcttctcgtggcctggtgggggtccacttctggtgcgcttcctggagcaaacaagggcgctcgccctggcgttggccgcggtggtgccgcgagacccagcccgcccacggagcacgcttgctgggctaagatgatgtgtctggcgtgcccggcgcgtcaggaaagagcgaggtgccggagcgacccaataattgttatgcagggcccagcaaagttggtgcaggcagcttggacatcagcaagagcctcatccgcaacccggcggagagtgggcagctggccacgcccagttcaggcgcctggggctcggctgcgtcgttgggtcgcggaccccagggtggcccgggactgtcccgcaacggtgtgggacccggcgccatcgctgagcgagctggatct

SEQ ID NO: 106 - DNA, 493 bp, Homo sapiens
cacctcccttacctgtaccacctcctgtgtcatcagcagtggcctggatgacctcatcagcatctgggaccgcagcacaggcatcaagttctactccattcagcaggacctgggctgtggtgcaagcttgggtgtcatctcagacaacctgctggtgactggcggccagggctgtgtctccttttgggacctaaactacggggacctgttacagacagtctacctggggaagaacagtgaggcccagcctgcccgccagatcctggtgctggacaacgctgccattgtctgcaactttggcagtgagctcagcctggtgtatgtgccctctgtgctggagaagctggactgagcgcagggcctccttgcccaggcaggaggctggggtgctgtgtgggggccaatgcactgaacctggacttgggggaaagagccgagtatcttccagccgctgcctcctgactgtaataatattaaacttttttaaaaaacc

SEQ ID NO: 107 - DNA, 427 bp, Homo sapiens
tttccttctggggagagagtgccccccctaccatgtagttgaacaggggctaggagctccccactcccctccctctaacagcaggctgtgtgggtttcaattcccatccttcccaccccggctaggtgtcgtccaccctgtatcctgtgtctgagtgtgtgtgggggggttctgtactaatttccatggccggtggcttttccttccatgcatcactcccccccgcatgcccaggggccacccgcctggcattaccgcatgctggggtcattgggggaggggggtggggctcacgctgtcctgtggtcttgagatttttatttttgcatatgtaatccattctgtacaggtagctaactttgtaaacgctgtgtattccctctgcccccatggctgctggtgtaaataaactgcatctcccgttgat

SEQ ID NO: 108 - DNA, 729 bp, Homo sapiens
ggactgcccagcctgtgtcgggggctttcagggtttcgtggggtttgcccggaaggcggctttcctccccctggtgtgaggtcgcgcccgaggcttgtacccgctagtgaggtgtttgagctggtcagcaaggagagggggtggggttccgcggaaggttctggaggggtcttggtaggtctgcagtgaaccgtcctgagaatggagtggggtcccatggtgcaggtctctgagcaaggcggaggtgtggaggagaggccggcttggggtggggcctcgcgccctagtgccggccggcctcagcccggctctgcctggtgctccctgcagtgccttctccatggccccgccctccccgcgtgtgcgccaggcttggggtccccgggagagcagagcttgcgcctcgggcatagggacgtggggtgcaggcgccaacatcagtggcagcagccagggccgtggtccagtcccactcggggatggagtgggccggcggccaaaccagtcactcggggaggaatgcggaggagcgctcattccattctatttaattgcagtgtacaaaattgtgtttgtatatagaataaactgtctgttgacagcgaaaaaaaaaaaaaaaaaaaaaaaaaaaaaagcggcctgatattcacaggggctccctacagaccaagcaaatttaatgggaaaagaacacttgacttcataaagaagaaatttaaaatatatttt

SEQ ID NO: 109 - DNA, 816 bp, Homo sapiens
taggctctttcggccaaagaggcctagacagcctgtccatcctgtcattgaagttggctcccaagcctttgccactcccagccacagcagacatcacttgtgtgtgtaagttgaacacattttactgtaaaaacaagagccatggttgctcagaacagctctagttctcccttggctgtgcctgatggaggcagaggacaagatggttcagcatgtaaccctttcctaccgcagagccatgccttcacttaatgccccaaaaggtgcagccggtatgtgaaccccatatggctgactcctgggggccccagccagggcagggtgtgtgtgtgcagaataagcagggccagggccctgccctggcatggctcagcagagccctcctccctcccacctcccaccctgctgccttcatcccccaggcgctgaagtatgccttccagacccacgaccgcctgtgctttgtgatggagtatgccaacgggggtgagctgttcttccacctgtcccgggagcgtgtcttcacagaggagcgggcccggttttatggtgcagagattgtctcggctcttgagtacttgcactcgcgggacgtggtataccgcgacatcaagctggaaaacctcatgctggacaaagatggccacatcaagatcactgactttggcctctgcaaagagggcatcagtgacggggccaccatgaaaaccttctgtgggaccccggagtacctggcgcctgaggtgctggaggacaatgactatggccgggccgtggactggtgggggctgggtgtggtcatgtacgagatgatgt

SEQ ID NO: 110 - DNA, 582 bp, Homo sapiens
ggtgaggctcacgggtaactcggtgggtgtctgtgtggttcgtgcacgatggcctgcaggccctgagtctcagtgagcgtgggcctgcggctccgtgggaactgcaggtctgggtcctctgtgtgccccggggccaggccaaaaccaggctggaacccgccggcagggcccccgaggcgcctctgcctgctctctccgttcttgccggcggcagcgattcggactcccgctttcgacaaagtctcagctccgcagcagcacccggcgcggactcgctgggcgcgcggactgagctccgggtggaaccaggaccctcgcgccctcgccctcgccctcgccctcgccctcgcccgagctggaccaccgcgagcaccgccgacgccagccgcagagccgcgggtgcgcggggaagaggaaacgaaagcgcgggctccggagctgaggtgagaagtgagcagaaagtgaaaagagaatccatcggaaacagataaaaaaggaaaaacaaaacccactcgaaaagaaagaaaacgttacaacaaaaaggataaagtaacgctaaatgaaataaaaaggagacatact

SEQ ID NO: 111 - DNA, 881 bp, Homo sapiens
ggacgggcctggccgcctcttccgctccctgccatcagtcaaggccgcccgcccacgtttctacgcctttctacttctcaatctgatttctatgaggtttttttaaacgagcaatccttggctgcttccttttcttaactctttcagtactgagagcagcccctccacactgaaaacacccagcactgtgacggagtccagcctggttctgggtaccgtgggccctgctcctgcccacttagcgaggcatgggctccttgcctcacctggccccggcaatcccactgaatttctactctggggtgggtggggcacacacttcggtttttttaatgccaattccgttttcatgccgaatctaagaagccacaacttgctttgtcagcttcagggcaggcagccatgacttcatttctcgcctgaacaaggaccatgctgtcctgcacgctgggtctgaccgtctgccctctctccccagcaccaagcgtgaccttggctgtggcgctcaacggccagctccggcggcccctctgctgctcctcggctttcccggaagtgggagagcctgcctggcctcggcctttgtccagcgaccaggctctgtccccgagaagctacggccgacctgggtctggtgttgggacgcatggaccgggctggggaggtgcacagagtgatgttaactttttcccgtgtgtagatatgtacagccaaagggtcgtgtaaatgttctgcaaaagtgggtctatacagagtgaaagctatttattttgtgcagagaaaaaagtctggagggatggaaccttcagggtttattcatatttaagatgtagctttttgttgtttcaggcattatgtataaagcaacgattattttatag

SEQ ID NO: 112 - DNA, 813 bp, Homo sapiens
cacacccacacctgagctgttctcagtgctggaacttgaccatcctggaacaccctggaagaaaaaggagcgcagggtgggccctcggcctgatgcaggagggtgcgatagcggacgtggccaggcaggaggggccgggttcaggagctgagcaggggatgcctgtgcgtggtgcctgggtctagggaagctccagccccaggatggggctgccctgcacaccggtgcccgccacatgccaaccctcacctccccgaggactggatgatgtgctgccacgtgtgactcgtctcccttgtctgccctgtgtgaccctcagtcttggccagccatgcatgcgcccgaagctcgtgcagtttgtacgtgaggtgctctcctccctgccaccatgctcatcactctggccttggccatgctccctggtcaccccacttcccggtcgccgtctgcagcactcctggagcagcctgggcccttcagcccctgtgctcgtcccaccctagggactcagccacttgcagaacaggatgggaccgagatttcagcgagccctcctggcgcccggtcctccctgtgggcaccagccctcttggtagctggtgtggagggccggtgtccttggctgccacggagggatttgatcaccgaagcagccacctgctgtagttggacctgaggtcagaggcggggcatcagaggctcaaggtgctgagaagccaccgggaaagcagccagcacaaagggcccaggaagccagcccccgagagctgagcgtgggggtctttgagtgtctttctccaagctgagacgtgg

SEQ ID NO: 113 - DNA, 604 bp, Homo sapiens
ggagaagatcaacaagatcaagtggctcccacagcagaacgccgcccactcactcctgtccaacgataaaactatcaaattatggaagattaccgaacgagataaaaggcccgaaggatacaacctgaaggatgaagaggggaaacttaaggacctgtccacggtgacgtcactgcaggtgccagtgctgaagcccatggatctgatggtggaggtgagccctcggaggatctttgccaatggccacacctaccacatcaactccatctccgtcaacagtgactgcgagacctacatgtcggcggatgacctgcgcatcaacctctggcacctggccatcaccgacaggagcttcaacatcgtggacatcaagccggccaacatggaggaccttacggaggtgatcacagcatctgagttccatccgcaccactgcaacctcttcgtctacagcagcagcaagggctcctgcggctctgcgacatgcgggcagctgccctgtgtgacaagcattccaagctctttgaagagcctgaggaccccagtaaccgctcattcttctcggaaatcatctcctccgtgtccgacgtgaagttcagccaca

SEQ ID NO: 114 - DNA, 541 bp, Homo sapiens
ggaggagggagctcgagagttgtggagactagtgactgggagaagtcgcagcccgctcaggcccgcgccttcccgctccccgtcttcctctctcacacacctactccgccctccgccccagcccgcgcgctagctccttctctcgcccggggttcctgccggtagctctccgggtcttggcgcggcgggggcgccccgggggtgccctcgccctcccgttgcgggcgggcgggcggtatgtggcgcctggtgcccccgaagctgggccgcctgtcccgctcgctgaagctggcggcgctgggcagcctgttggtgctgatggtgctgcactcgccgtcgctgctcgcctcttggcagcgcaacgaactgaccgaccggcgcttcctgcagctcaataagtgcccggcgtgcttcggcacgagctggtgccgccgcttcctcaacgggcaggtggtattcgaggcgtggggccgcttgcgcctgctggacttcctcaacgtgaagaacgtgtacttcgcgcagtacggcgagccccgcgagg

SEQ ID NO: 115 - DNA, 565 bp, Homo sapiens
ctcgcttctctgcattacacgccggtcaggattcgcgacccgacatggagcgtccccgcagtccccaatgctcggccccggcctctgcctcagcttcggttaccctggcgcagctcctgcagctggtccagcagggccaggaactcccgggcctggagaaacgccacatcgcggcgatccacggcgaacccacagcgtcccggctgccgcggaggcccaagccctgggaggccgcggctttggctgagtcccttccccctccgaccctcaggataggaacggccccggcggagctggcttggttgaggcagcgactgcgccttcttcatggcatacagtgggcccctgaggttccaggtcctttgcggcggcgatctggagggcgtggctacaggacccgggatgccattcagttactcatcttttatgctttcgtcctgacctgtctcaactagacttgctcctgcaaccaccatgggggttttgcatttacatttgtggaccatgttacagttaagaaaaatcctgtttcagtccttatatgtaataaaatgttttatgatgg

SEQ ID NO: 116 - DNA, 894 bp, Homo sapiens
  misc_feature 455,503,577: n = a,t,g, or c
cgcctctacgttccgcgcgggagcccacgcgcggttcgtccggaacccacagaccagagacgcaggtcccagccttttcggtgtcggcgccagttcccggaggagcggacatgagtgaaagccaggatgaagttcctgatgaagttgagaaccagtttatattgcgtctgcctctggaacatgcttgtactgtcaggaacctagcacgttctcaaagtgtcaagatgaaggataaactaaaaattgacttattgcctgatgggcgccatgcagttgttgaagtagaagatgtccactagctgctaagctgggtgacttgccttgtgtttattgaaagcctgaagaacgcctgaatacacaaaccttttataaaacagcagacattctcagatgcttgtgttgcactgctgatggtgatatccacctttctccagaagaaccagctgcctcttacngatcctaatatagtcaggaaaaagaaaggggagagaagaaaaatgttntctggaagcatggcattacgccaccacttaagaatgtcagaaagaaaaggttccggaaaacacaaaaaaaggtnccctgatgtcaaagaaatggaaaaaagcagctttactgagtacattgaatctcccgacgtggaaaatgaagtaaagagactgctgcgttcggatgctgaagccgtaagtacccgttgggaagtcattgctgaagatggaaccaaggaaatagaaagtcaaggctccatcccaggatttttgatatcctcgggaatgagcagccacaagcagggtcatacctcgtcaggtactttagtaaaggcaaagcaggagtttcagatagggcaggtattgactgggtatcagatcattttccataaattcataggccaatccc

SEQ ID NO: 117 - DNA, 807 bp, Homo sapiens
caggcgcttaggggctgaggcgcgatggcaggtgtcggggctgggcctctgcgggcgatggggcggcaggccctgctgcttctcgcgctgtgcccacaggcgccaggggctctacttccacatcggcgagaccgagaagcgctgtttcatcgaggaaatccccgacgagaccatggtcatcggtcaggcgggctgagggcaactatcgtacccagatgtgggataagcagaaggaggtcttcctgccctcgacccctggcctgggcatgcacgtggaagtgaaggaccccgacggcaaggtggtgctgtcccggcagtacggctcggagggccgcttcacgttcacctcccacacgcccggtgaccatcaaatctgtctgcactccaattctaccaggatggctctcttcgctggtggcaaactgcgggtgcatctcgacatccaggttggggagcatgccaacaactaccctgagattgctgcaaaagataagctgacggagctacagctccgcgcccgccagttgcttgatcaggtggaacagattcagaaggagcaggattaccaaaggtatcgtgaagagcgcttccgactgacgagcgagagcaccaaccagagggtcctatggtggtccattgctcagactgtcatcctcatcctcactggcatctggcagatgcgtcacctcaagagcttctttgaggccaagaagctggtgtagtgccctctttgtatgacccttcctttttacctcatttatttggtactttccccacacagtcctttatccacctggatttttaggg

SEQ ID NO: 118 - DNA, 799 bp, Homo sapiens
  misc_feature 747: n = a,t,g, or c
ccttgattatagtaggaagctgaaaaatgtattagttaccatttactggctgggaaaagcagcaaacagctgcacatcctacagcggaacgacactaaacctgaaggagtttgaaggattgttggctcagatgcgaaaggacactgatgacattgaaagtcctaaacgcagtatccgagacagtggctacatcgactgctgggattccgagcgcagcctccctctctcctcctcgccacggcagagatgattccttcgacagcctggattcctttggctctcgctctcggcagacgccttcaccagatgtagtcctcaggggaagcagcgatgggagaggaagcgactctgaatccgacttgcctcatcggaagctgccagatgtgaagaaggatgacatgtctgcacggcggacttcccatggtgagccgaaatcagcagtgccttttaaccagtacctcccgaacaaaagcaatcagacggcctacgtccccgcgcctctgagaaagaagaaagcagagagagaggaataccgcaagagctggagtaccgccacctccccgctgggtggggagaggcccttcagatacggtccgagaactcctgtgtctgatgacgcagagagcaccagcatgtttgacatgcggtgtgaggaggaggccgcggtgcagccgcacagcagggcccgccaggagcagctgcagctgataaataaccagctgagggaagaggacgacaaatggcaagatgacctggctcgttggaagagtcgtngaagaagtgtttctcaggacttaat

SEQ ID NO: 119 - DNA, 375 bp, Homo sapiens
ctcgacatgggggaggccggggctggcgctggcgcctcgggagggccggaggcaagcccggaggcagaggtggtgaagctgctgcccttcctggcgccgggcgcgcgggcggacctgcaggcggcggcggtgcggcacgtgctggcgctgactggctgcggacccggccgcgcgctgttggcggggcaggcggcgctgctgcaggcgctgatggagctggcgccggcctctgccccggcccgggacgccgcccgcgcgctcgtgaacttggccgccgaccccggcctgcacgagacattgctggcggccgaccccgggctgccagcgcgcctgatgggccgcgcgttggacccgcagtggccctgggccgaggag

SEQ ID NO: 120 - DNA, 649 bp, Homo sapiens
  misc_feature 73,116,202,607,642: n = a,t,g, or c
cacttttcagaaagacaggcaacgtgttggaccttccggagcatctcagaagacagagggttttcttttgagngagcacaacattttacccacgtgcctgaaggacaggccaagcngaatggaagccttctgaggcactggagcagaagggaaaacttgcacatggtcgcaaaggacttcacactgttccatcccctctacngccatccaagaggcctcttgactcttccagaatcagatgtaaaagacaagggcagtggcactgctcgtcgttgctggggatacattcgcagtgccacacctcctccaccttctccacggggtagacggcttccacctagtggcagatgagccgcagctgcgtagggtccagctgcttcttgttgcaagcccgaaaattgttgtactgcagctggaggttctcggcggtggaggagccccgcggcaaagttgcccacggagaggctctgctgcacgatcttgcacacctccttgtcggacagcagaaaaagtacttcaactcggccgggcacggtggctcacgcctgcacgcctgtaatctcagcactttgggaagccgagacgagcggatcacgaggtcaggagntcgagaccatcctggctaacacggtgaaaccgtgnttctact

SEQ ID NO: 121 - DNA, 761 bp, Homo sapiens
  misc_feature 664: n = a,t,g, or c
gcgcgacccgctccggggacagtgccaggtggggagtttgactggggcggtacacctgtcaaacggtaacgcaggtgtcctaaggcgagctcagggaggacagaaacctcccgtggagcagaagggcaaaagctcgcttgatcttgattttcagtacgaatacagaccgtgaaagcggggcctcacgatccttctgaccttttgggttttaagcaggaggtgtcagaaaagttaccacagggataactggcttgtggcggccaagcgttcatagcgacgtcgctttttgatccttcgatgtcggctcttcctatcattgtgaagcagaattcaccaagcgttggattgttcacccactaatagggaacgtgagctgggttagaccgtcgtgagacaggttagttttaccctactgatgatgtgttgttgccatggtaatcctgctcagtacgagaggaaccgcaggttcagacatttggtgtatgtgcttggctgaggagccaatggggcgaagctaccatctgtgggattatgactgaacgcctctaagtcagaatcccgcccaggcggaacgatacggcagcgccgcggagcctcggttggcctcggatagccggtcccccgcctgtccccgccggcgggccgcccccccctccacgacgcnccggcgcgcgcgggagggcgcgtgccccgccgcgcgccgggaccggggtccggtgcggagtgcccttcgtcctgggaaacggggcgcggccggaaag

SEQ ID NO: 122 - DNA, 369 bp, Homo sapiens
  misc_feature 128,267: n = a,t,g, or c
aaaaaaactataaaaaagaaagaattaaaaactttcagagaattactatttactttattaacttacggatttattatataaatatatattcacctagcaacatatctctgccgtctctcctgctctcntaatgaagacatagccgattctctgcccgggccccttgctgatgctcctccgggtctgcgtcgggcgtgggtctctggggaccctccagaggtggaggtgggctgatggcctggctgcctggtggttgatggttttgcnccccctaccttttttttttgagtttattctgattgattttttttcttggtttctggataaaccaccctctggggacaggataataaaacatgtaatattttt

SEQ ID NO: 123 - DNA, 867 bp, Homo sapiens
  misc_feature 259,286,350,356,434,473,480,495,497,502,508,824,829: n = a,t,g, or c
atctatggcctggataggcaggaagggcttggaccctgagccccgcagaaggttgcatgaacgagtggtgtgaagcctgttgggtagcttggccactcccgcggcatgggtcacctgcacaggaggttttgcccaccagggggcagcagagggtcagggagcaatgggccctgggtggagcatgggccccgcctgctgtgtgccaccctgggtgtggcacctgctcacatccaggggttggtgcagggaaaggccaganggtggccaggcacacctgagagggggnacccagaagcccccgggacccaggggccctgggcaagcccccagaaaccttgttcttgcaactntctgcngtgtgcccgggccaccctctggcctggtcttccatggggcggggcgcccacccttctcaactcaggtttccctgggcngcaggtgcccctcagcacccctggggttgcggaagtggnccggggnccctggcttccttgncntgccntccccngagcctggttcaaggcctctctgtcttctcggctgtttcacgacgtgttttgttacttggcgggtttgctttttgctgtgtcgtggttgtctcttctcttactcgcctccggggtactgccggggtttttttggtgtgttgctcgtgctgtcagtcctccccctgggcctccccggttctgttgttctcctttctttagttgtggtggttgttgtgtgccaagtttgcccccctgccctcctgcctgggcttctgtgcaagactctttctttgttcaaaaaaaaaaagagggagaaagaacctgtgaaacatttgnttgtntgtgaggaagaaagatagttgctatttgggaagaaacg

SEQ ID NO: 124 - DNA, 694 bp, Homo sapiens
ctgcactccagcctgggcaacaagagcgaaactccatctcaaaaaaactaccaggaatgaatgtttagctaaaaaattccttccatttcaaagtagaatatgggagattggttaagcagttactcagataaagaggattgtgatttcagaagatggcacagtttgagtcaaaaatgagaaattcccctggccaaaatgtggtaatgagatttcaggttatattaatagaagtatggtatcttcactgtggaggtgctggtcctctctggggcatcaatcatcccatagctagagtattgtgtttgggttttagtaacattacaaatatgggtggggttatcatctgtccaaatcagttctctggtgtcagttatttaatggtttcccatcatacttaaaaatcatatccaggctgggcgcagtggctcacgcctgttatctcagtgctttgagaggccgaggcgggtggatcacgagatcaggagatcgagaccatcctggctaacagggtgaagccccgtctctactaaaaatacaaaaaaaattagccgggtatggtggcgggcacctgtagtcccagcgactcgggaggctgaggcaggagaatggtgtgaatccgggaggcggagcttgcagtgagtggagatcgcgccactgcactccagcctgggtgacagagcgagactccatctct

SEQ ID NO: 125 - DNA, 787 bp, Homo sapiens
  misc_feature 675,751: n = a,t,g, or c
agtgatcctcccacctcggcctcccaaagtgctggattatgaatgtgagtcaccttgcctggccaatttcaggagtttttcacactgtacagactacggagatcctgcactgaaatcaggaactgctacaggcttatgggatgagatctgatgtcctaatgtggcatttaaggtgatatagtccagctggctccaggctacctcctcagggtttatcctaatccccactaaccaaatggtttgctaaacattccatacatactctttctctgcacaaatcctctcatggctgaatccagtgacctatggcctgtggagatgaccttttgcttcagcttttcccttgtccatagtccagctccatttctacctaccttctttataaaacgtccccaaaacatttctgctcctggggatatatttcataccctttgaactgcagttacattattgctctgaaacaaacatcaaaatagtatttgctcttttaagaataattttttaggccggcacagtgggtcgcgcctgtaatcccagcactttgggaggccacagcgggtggatcacctgaggtcaggagttcgagaccagcctggccaacatggtgaaactctgtctctactaaaaatacaaaaaattagtcaggcgtggtggcgggtgcttgtagtcccagcnacttggaagattgaagcagtagagtcgcttgagcctggaaggcggaggttgcggtgagctgagattgcgccactgnactctagcctgggcagcaagagtgaaactctgtctc

SEQ ID NO: 126 - DNA, 880 bp, Homo sapiens
  misc_feature 263,843: n = a,t,g, or c
cgcagaatgaattattttttggttacccaaaggcaatctaaaaattacttggagctgagcagggcgcgcagttcagagccccagcaggccgccctgctggtcagcgggacacacagggttagcgcggcggggtgtgggcagcccctgtggctcgagagcctgtcacttaactggtggatccgttatttcccagaatggttaaattcccctcggggagagcttgggtgaaacaagaggcccaaaatatgtaactcttgatggangggatcctcctggaatcagcatttcaggctgttctgtttcccggcaactcctgtgacttcctcaaggcggtgcccagcctggccctccctcgcgggggcccaggacgcactccctgcctgtgcctcttaccacgagccgggtgctgtccctccagctcctcctgagcgaggccgtgcactaacagactcgatctcccttcacgcctgtaatcgtccttagagactgacttgtgccacagctgcgggagacagcgctgctgcagggcttggctgaggtggccgcgagcggactgcacgcgcgctcctggggggcgtggttgggatcggcttctgggagcccctccagcagcgctgtctctgccggcatgtgagtgaaggtgcttctcttaccgtgtgcccctcgaggtaaacctgtaactggaatgtgtgtggagtgtgactgatagaacactacctgattcttatgtatttactgacctgtgtttttttgctactttttttcttttctccccttcccctttccctattttttttcttgccctgatccggaatttctttgccaactgactgcacggtactnctgcttcctgttgttgcttgaaacaaaacaaaaacat

SEQ ID NO: 127 - DNA, 460 bp, Homo sapiens
gtttttgaacagcatttatcaagaagaaaatgtgggctttttcccctctcccgtgttttgtttgtcctgtagatagagggaggaaagccgtgcagtggcaggcgggaccccctctggtggcgggaccccctcttgcggtggtcttgcggggccagccgggacctgtcactttattatttaaggagtgtgtgtgtagagtcgctggcttattaacagtattgtgtgtgggttgggtttttagtttgttccttctttttgaagtcccttcatttcaatccttgactctctctccccttcccttgcccagctctgttgaatgctgctgtgcgcgtgtgagggccgctctgcacacagggcccttgggttgtgtgaactgaaattctccctgtatttgtgagactcgcaggagtccccatctgtagcacaggcaatgccagtgccatgctgcagcctcaggaaa

SEQ ID NO: 128 - DNA, 495 bp, Homo sapiens
caactctaaattttaagttattatatcaaattctgggctggacaggtaaggtgtttgccatacatgattgcaattgtgaggtttctttgtgtataaagtctttaaatttatatggtaggtcaaaaaacatattagctgataataatacttactttcaaatatcacttaaaatttctcttcaaaagcatttttttaaatctctttttaacaccttgacccaatgaagtaaaataaacaagatgatactcccgttaaatgtgtgtacaatcattcagctgctgtggcagaatatacaacagttctcagccctgtgtggtcctttctcaatttgtcactcaattgattgtactcatacatgtgttagaccaacatcctcaataccgtttgttggttagcatcatctggggagactgtaaaagcataagaatattcagctaccaacccagggggttctttaaattagtgggactggggtggtgtccaggcatcagttgt

SEQ ID NO: 129 - DNA, 557 bp, Homo sapiens
  misc_feature 420: n = a,t,g, or c
cggagtttgagccccggaggcagagcggctgccatggccaagtacctggcccagatcattgtgatgggcgtgcaggtggtgggcagggcctttgcacgggccttgcggcaggagtttgcaggggtgagccaccaactcggaaggcccagggtgaagtgtgggctgctgaggactgagcgatcacccacatgtccacacagccagccgggccgcagctgatgcccgaggacgcgctggacaccggtctgcagccgcttccaacctctccggcctcagcctccaggaggcacagcagattctcaacgtgtccaagctgagccctgaggaggtccagaagaactatgaacacttatttaaggtgaatgataaatccgtgggtggctccttctacctgcagtcaaaggtggtccgcgcaaaggngcgcctggatgaggaactcaaaatccaggcccaggaggacagagaaaaagggcagatgccccatacgtgactgctcggctccccccgcccaccccgccgcctctaatttatagcttggtaataaatttcttttctgc

SEQ ID NO: 130 - DNA, 600 bp, Homo sapiens
cttggtttccagaatttctagagtgggtgggcatgattccagtcaatgggggaccgcccgtgtctaagcatgtgcaaaggagaggagggagatgaggtcattgtttgtcattgagtcttctctcagaatcagcgagcccagttgtagggtggggggcaggctcccccatggcagggtccttggggtaccccttttcctctcagcccctccctgtgtgcggcctctccacctctcacccactctctcctaatcccctacttaagtagggcttgccccacttcagaggttttggggttcagggtgctgtgtctccccttgcctgtgcccaggtcatcccaaacccttctgttatttattagggctgtgggaagggtttttcttctttttcttggaacctgcccctgttcttcacactgccccccatgcctcagcctcatacagatgtgccatcatggggggcatgggtggagcagaggggctccctcaccccgggcaggcaaaggcagtgggtagaggaggcactgcccccctttcctgccccctcctcatctttaataaagacctggcttctcatctttaataaagacctgtttgtaacag

SEQ ID NO: 131 - DNA, 455 bp, Homo sapiens
ggccgggcccaggcaggtggaagccatggctctggccgggtcacagggcggctggggtttgacctggcggccatgatgggctctggacccaggagccacccgggcacaggatgggacgggttgagagattggtcgtccaggcgttgagtgtgccctcgctcctccccaccttccgccgtggccttgagccccttgcgcccgcgcccatggggttaaatctctccctgtctctctctgctccaagttgttttccaagtgaggcagagaatggttctcttgttaccaacatggcttctgggcattgggtaatgcgctccctcttctcccgcagcgccacaaagggaccttttgttcccctccctgcccctctcgctggctcttcccggccccccacccacccaaactccctcctccccccgccggcgcccgcaccccggggctgcgcgctgaccgtg

SEQ ID NO: 132 - DNA, 691 bp, Homo sapiens
  misc_feature 608: n = a,t,g, or c
gcagaagcagcagcagcagcagcagccctcgccgttcgcggagcgcagccgagccggccatggcgttgtcgatgccgctgaatgggctgaaggaggaggacaaagagcccctcatcgagctcttcgtcaaggctggcagtgatggtgaaagcataggaaactgccccttttcccagaggctcttcatgattctttggctcaaaggagttgtatttagtgtgacgactgttgacctgaaaaggaagccagcagacctgcagaacttggctcccgggacccacccaccatttataactttcaacagtgaagtcaaaacggatgtaaataagattgaggaatttcttgaagaagtcttatgccctcccaagtacttaaagctttcaccaaaacacccagaatcaaatactgctggaatggacatctttgccaaattctctgcatatatcaagaattcaaggccagaggctaatgaagcactggagaggggtctcctgaaaaccctgcagaaactggatgaatatctgaattctcctctccctgatgaaattgatgaaaatagtatagaggacataaagttttctacacgtaaatttctggatggcaatganatgacattagctgattgcaacctgctgcccaaactgcatattgtcaaggtggtggccaaaaaatatcgcaactttgatattcc

SEQ ID NO: 133 - DNA, 497 bp, Homo sapiens
gcaggtcgcccaagtccagccccacgacgcagtgccgactccccgccgtgcccccagcccggcccgggttgcggagcctgctcctgggcctctgcctgctgcgtccaccctgggggaagcgcccgtcgtaccctccacaccgggggcttcccctgaccccttaggccctccccctgcaggtgccctcgcgcccctcccggggtccccaggtgagtaggggctgaatatgacaggagaggccgccggacgggcgtggccgggagggaaatggggctggattctagagcgtcggacctggccgccagaactggccgtctccgtcccgggcactccgaccgtgggaccggagccctgagtggcggagagctggcggagctgcccccaaaggagcactgagtcccggaagtggtctttttgtggagggggctgtggggctcgtcccacctgcccccttctttccagcacttgcatggcgcttccctctattttcactcttg

SEQ ID NO: 134 - DNA, 834 bp, Homo sapiens
ggggagtgggttctcgcccaaagagcatctgcccatttcccaccttcccttctcccaccagaagcttgcctgagctgtttggacaaaaatccaaaccccacttggctactctggcctggcttcagcttggaacccaatacctaggcttacaggccatcctgagccaggggcctctggaaattctcttcctgatggtcctttaggtttgggcacaaaatataattgcctctcccctctcccattttctctcttgggagcaatggtcacagtccctggtacctgaaaaggtacctaggtctaggcccttcttccctttcccttcctctcccctaccccagaactttggctccctttcccttctctctctggtagctccaggaggcctgtgatccagctccctgcctagcatccatgacctgttggatgttacctccaatcagtttcctgtcctacctgcctctttggcttggacctatatggccatgctctggctctacccttgggaagcctgatcccggtgtgtggcccagcttgttcaggccctgggatgctgcatctccaggcaactatgcactttcccggggagagaaccagtatgagaagtgggggcagggcacacattcatctttgtaggaaggtctggcctggggtcgggtgaaggagggcccaggtcagttctggggtcccagtgacctgctttgccattctcctggtgccgctgctgctccctgtttctggagctggatgttccccagctggcagttgagctgcctgagccaatgtgtctgtctttggtaactgagtgaaccataataaaggggaacatttggcccc

SEQ ID NO: 135 - DNA, 814 bp, Homo sapiens
gtggaggccgcgcctgaataccgcgtcatcgtggatgccaacaacctgaccgtggagatcgaaaacgagctgaacatcatccataagttcatccgggataagtactcaaagagattccctgaactggagtccttggtccccaatgcactggattacatccgcacggtcaaggagctgggcaacagcctggacaagtgcaagaacaatgagaacctgcagcagatcctcaccaatgccaccatcatggtcgtcagcgtcaccgcctccaccacccaggggcagcagctgtcggaggaggagctggagcggctggaggaggcctgcgacatggcgctgcagctgaacgcctccaagcaccgcatctacgagtatgtggagtcccggatgtccttcatcgcacccaacctgtccatcattatcggggcatccacggccgccaagatcatgggtgtggccggcggcctgaccaacctctccaagatgcctgcctgcaacatcatgctgctcggggcccagcgcaagacgctgtcgggcttctcgtctacctcagtgctgccccacaccggctacatctaccacagtgacatcgtgcagtccctgccaccggatctgcggcggaaagcggcccggctggtggccgccaagtgcacactggcagcccgtgtggacagtttccacgagagcacagaagggaaggtgggctacgaactgaaggatgagatcgagcgcaaattcgacaagtggcaggagccgccgcctgtgaagcaggtgaagccgctgcctgcgcccctggatggacagcggaagaagcgag

SEQ ID NO: 136 - DNA, 457 bp, Homo sapiens
gtcccgggagctcccgctcgggcctgcggacgccatggagcttgctgaccacctggtgaagcgggcggctgccgtgcaggcggatgatgtggaggtgctgaaggtggggaggacccagctgatcgacgccgttctgaatctgtgcacctaccatcaccctgaaaacatccagctcccaccggggtaccagcctccgaacctcgccatctctaccctctactggaaggcctggcccctcctgctggtcgtcgccgcattcaacccagagaacatcggcctggctgcgtgggaggagtacccgaccctgaagatgctcatggagatggtgatgaccaacaactactcctacccaccgtgcaccctgacggatgaggagacccggacggagatgctgaaccgtgagctgcagaccgcccagcgggagaagcaggagatcctggccttcgaggggcacctg

SEQ ID NO: 137 - DNA, 813 bp, Homo sapiens
ggaaggatgaggctgcgtttgcagcgcgtgaatgagacgcggatatcaaagcagactgcaatacctgcgtggaaatagaagacagaaaggtgagtcaatatttttcatttttagggttgcaaacaaaacaagaactctgtgaattgaacccaggtgtttaaggcatgcccctctcgatgatggtttgtaggtgattcacggtctatgacatatttaaagacaatcagacttaaaaatgcttgtcattttactcctttacaatctgtgttacttctgatggcttcatgaggagtgcatattgtaattttttacaaaaaatgtggtgctgatttgtttcagtcatacccttcttttcaggaaaatactttaacacttgtcacattgaacttgaatattgatgttgacgttcattgtgtgtatcatatgtataattattaattatattattacttacattatagaatatataatattaggcttcccagggtgtgtccctatatatctgactcatacacttgaaaaagagctcacggccaggtgtggtggctcatgcctataatcccaacactttgggaggcaggggtgggtggatcatctgaggtcaggagttagagaccaacctggccaacatggggaaaccccgtatctactaaaaatagaaaaattggccgggtgtggtggcacgcgcctgtggtcccagctgcttgggaggctgaggcaggagagtcgcttggtccttggaggtggagactgcagttagccaaaattgcaccagcgcactccggcctgagtgacagggtgggcctccgtttc

SEQ ID NO: 138 - DNA, 687 bp, Homo sapiens
ctttctggtcttagtctccccatctgaaaatggcataaccaacctacctgcctcaaatacaagaccctgcttgtgaagccggactcctctgcaccaccctcgccaccgacgccggtgcgctagtctccgctcgctcggatgcacttgctgcgcccccgccccgcgcagacccgcggcgggcgcccgcgccggttctgcccacgcacacttgatgctctgcgccttttgggcagcgcccacgcaacgactacgcacccgaaccctgcctccggcacccttggccacactcgccacacttacacgcgcgcacttctccagaggacgcacgatgggaaagagagagttgggacccgcaggagggggcagggcactgacccggtgccgcccagcagggcagcgtctcctggctcagaccagtgctagaagtgtccagtctagcagctcctggaccaagactccgtggccattcccttcctcctgccttccatccacccccttacgatacagaagttgagatacagagaggtgaaggaacttgtcccaggccctacagctagtaagtgatggacctggaatttaagcccaggtagactgcctctagagactgtgcttacaacccttttatcctgtgcctgttccccttttatcctgttgtagttttcatcttctaagaactatttcattggg

SEQ ID NO: 139 - DNA, 727 bp, Homo sapiens
ggcagtttgctgggactgctgagactggggctgaggatacgcagcctgctgggagagcgtcgagggtgctggctgctgaggttgctgctgctggtaaggagactgagcctgtggctgtgagtaggggggctggctctgggggtgctgctgtgtcgtcgactgctgggaggggtatggagccggggactgctgatgtggaggctgggatggctgctgggagtatggaggctgagaggactggagctgtggtggttgagactgtggctgctgctgatacgaaggttgggcatgaggggtctgggacggtggttgctgggagtagggtggctgctgctgctgagggtgaggactttgctggttgtaatatggagtctggccctgttgaccatacccgctggggccttgttgtccataaggaggaatctgctgtgtataagagaggccgcccatggcactctgcgcccggccctgcatggtcatcgggtaccgctgcggggtctgggacccgtatggctgccctgggtacccatgtccttgctgcggtcctgacggaggtccctgttgctgcgagtatgggttagtcccgccatatggctgaggtctcatcttgcccatctgatccattggactggatggctgaggggtccgggcgagcggctgccccccgccgccgctgctcccggggctcatgggcgcgtggtggctcctttgttgggcccctcccgag

SEQ ID NO: 140 - DNA, 812 bp, Homo sapiens
gcttaatctatttcatgaagccacatgcagatgtctgcacccccccatggctgcaggctttgctttcagccttctttcaaggaaagcctggggctttctggtttctcatttatatttgtgtctgcagggtgcaacaccggaggatttcagcaacctcccacctgaacaaagaaggaaaaagctgcagcagaaagtcgatgagttaaataaagaaattcagaaggagatggatcaaagagatgccataacaaaaatgaaagatgtctacctaaagaatcctcagatgggagacccagccagtttggatcacaaattagcagaagtcagccaaaatatagagaaactgcgagtagagacccagaaatttgaggcctggctggctgaggttgaaggccggctcccagcacgcaacgagcaggcgcgccggcagagcggactgtacgacagccagaacccacccacagtcaacaactgcgcccaggaccgtgagagcccagatggcagttacacagaggagcagagtcaggagagtgagatgaaggtgctggccacggattttgacgacgagtttgatgatgaggagcccctccctgccatagggacgtgcaaagctctctacacatttgaaggtcagaatgaaggaacgatttccgtagttgaaggagaaacattgtatgtcatagaggaagacaaaggcgatggctggacccgcattcggagaaatgaagatgaagagggttatgtccccacttcatatgtcgaagtctgtttggacaaaaatgccaaaggtgctaagacttatatttaatacc

SEQ ID NO: 141 - DNA, 621 bp, Homo sapiens
gtggttgtgattgctccttggtagccctgagaacttaaaaaatggattgtagtattaaagtcaaacagattttgcctttctaccgagatccatattaacagtttggaacttctaatcataaatatcagacctgtatcagacttgcaatagcaaggaaaaagaaactatcctacatctcaaattccaacaagttttaaatataacaggagagcagaattgtacaaactttcatatggagccattgattttagctcaacttgatgttctaccatattagagtgcatgtttcaactttctgctataaagagaaaacaggaaagggagataagaaaggaaactccagctgggcacggtggctcacgcttgtgatcccagcactttgggaggccgaggcgggcaggtcacgaggtcaggagttcgagaccagcctgaccaacatggtgaaaccccgtctctactaaaaatgcaaaaattagctgggcttggtggtgcatgcctgtggtctcagctactcgggaggctgaggcaggagaatcgcctggactcgggagtgagagattgcagtgagccgagatcatgccgctgcactccaacctgggtgtcagagcgagactctgtctc

SEQ ID NO: 142 - DNA, 572 bp, Homo sapiens
caggaacttgtcacacagacggagccaggtgtaatgccagccccagggccaagcagcagctttgcaaatgttgcagcagccacaccacagtaagaaattctttttctgcgcatccaggtggctccaaccagcaccgtcctttccgtgtggggtgtgcctgaccccctcctttccccctcccagaaaggtgaagaagccggccctgacctcccaagtccattccatggcttgctgatgggctgggtcacagctctaaacccctcaacctggcctgtcctggagcaggcggctttggtgagcacagctgctgaaggggcggcaaatgccggacgtgcctgtcctgctcactggggtcgtgtctttgcccagcctggcccaggcactgggcggggagaatggggccttgtgtctccagctcacagccgagctttcagagcatgagactgggttcattgttcagaaccgggaaaactaaaaacagcattgagagtggaacttgggccttctggaaatgacagctgagtaaagactcatttattctgctttccttcttgaaactcactgcagtgaac

SEQ ID NO: 143 - DNA, 709 bp, Homo sapiens
gcatcagcgatggcggctgcgtcggggtcggttctgcagcgctgtatcgtgtcgccggcagggaggcatagcgcctctctgatcttcctgcatggctcaggtgattctggacaaggattaagaatgtggatcaagcaggttttaaatcaagatttaacattccaacacataaaaattatttatccaacagctcctcccagatcatatactcctatgaaaggaggaatctccaatgtatggtttgacagatttaaaataaccaatgactgcccagaacaccttgaatcaattgatgtcatgtgtcaagtgcttactgatttgattgatgaagaagtaaaaagtggcatcaagaagaacaggatattaataggaggattctctatgggaggatgcatggcaatgcatttagcatatagaaatcatcaagatgtggcaggagtatttgctctttctagttttctgaataaagcatctgctgtttaccaggctcttcagaagagtaatggtgtacttcctgaattatttcagtgtcatggtactgcagatgagttagttcttcattcttgggcagaagagacaaactcaatgttaaaatctctaggagtgaccacgaagtttcatagttttccaaatgtttaccatgagctaagcaaaactgagttagacatattgaagttatggattcttacaaagctgccaggagaaatgg

SEQ ID NO: 144 - DNA, 851 bp, Homo sapiens
ctagatgtgaaatttctgaaaatgttgaagcagagaaacattcacacacaaaaagcaacatagtcatgtgggtccagatggcctcagtcctagatgttggcaccctttgctgtgtctcctcagagtatcctgttccgcctcctgccacctggacctccctcagtggatgtcttccctcccccgaccccagcctgtcagtccgagcacagtgcaggtttggctctgacttgggcttttggctgcagtgggggtggatttcagagcctctcatggcagcatctaagtgaccagagctgggatgagagaggggaaggggcaatgtgagtggcgctatgggacgggccagccctgctcctgagccagccccgccctctgccccctggccctgggctctgtgctagggatggtgaagaatgggggcgtgccagcctggcaggagtgggaagcaacacgcaggggtcccggacctctccagccttgccctcacgcttacccgagctcccagtgtggttagcacagagctcacccaccttgcctggctcccagctggggcctgtcctcactggtgctccaggggaagaaacgacagcctcacttctgtatggactgctgatgtggcctgccatcctgttcagcgggcattgtctttggagcagcaggagaataggatgcctctcactcacatgccagttcctggctggccagctgctcagggctcaggctggggcctcccattgacatcctccccctacactccctctctgagcctccgtcgcccctcctgttgggtaagggtgttgagtgtgacttgtgctgaaaacctggttcatatataataaataatggtgacg

SEQ ID NO: 145 - DNA, 422 bp, Homo sapiens
gttcgctggtggcgtcggagccgagccggactggtcaggatgatcacggacgtgcagctcgccatcttcgccaacatgctgggcgtgtcgctcttcttgcttgtcgttctctatcactacgtggccgtcaacaatcccaagaagcaggaatgaaagtggcgctttctccgccccagggttccaggacatagtctgaggcaagatggagggtatgaggggccttcacacttcacttcatcccttctacccatcacaacatacaaagcaactacacctggatttttccaaacaacttttatttcctcagagtcttccttaatcctatggaacaagaagctgccactgaatagggcccagtataggggcttgcttttctactccctccccccaatataaaaatatagacttttttttgtggtccc

SEQ ID NO: 146 - DNA, 555 bp, Homo sapiens
ccgatgcccagggatctgggacggccatgggcttcacctgcacaggcacccctggcccaatcctcacagctgccactcccacactgctcccgatggaaattccagagctttacagaatcccctgttttatgaaaaggggtagacgtggcagctcaccccaggtcgcacagcctcatggccagccggggtttgaaccctggaccacctgcttcccccacacccaggggctttccagggggtgcctggagggggagggaagccgatgtttggtgggtgagcctccctgagtccatccgttttttgtttgtttgtttacttgcttgtttgtttttgagacagtttcacagtttcattcttgttgcctgggctggagtgcaatggcgtgatctcggcccactgcaacctctgccgcctgggttcaagcgattctcctgcctcagcctcccaagtagctgggattacaggcgtgagcccctgcacccgactatccatctgttttttgtgtttgtgatggagtcttgctcccgccggggcggcggggggggactctttctc

SEQ ID NO: 147 - DNA, 513 bp, Homo sapiens
gtgctcagcccccggggcacagcaggacgtttgggggccttctttcagcaggggacagcccgattggggacaatggcgtctcttggccacatcttggttttctgtgtgggtctcctcaccatggccaaggcagaaagtccaaaggaacacgacccgttcacttacgactaccagtccctgcagatcggaggcctcgtcatcgccgggatcctcttcatcctgggcatcctcatcgtgctgagcagaagatgccggtgcaagttcaaccagcagcagaggactggggaacccgatgaagaggagggaactttccgcagctccatccgccgtctgtccacccgcaggcggtagaaacacctggagcgatggaatccggccaggactcccctggcacctgacatctcccacgctccacctgcgcgcccaccgccccctccgccgccccttccccagccctgcccccgcagactccccctgccgccaagacttccaataaaacgtgcgttcctctcg

SEQ ID NO: 148 - DNA, 801 bp, Homo sapiens
ggaagagaaggaaaaaagagaaggcgctgtcccgctcttgctacggtggcctggaggagtggcgaaaccggaacagagaatttatcacttctgggactcacagtcgtgatgtctttcaagagggaaggagacgattggagtcaactcaatgtgctcaaaaaaagaagagtcggggacctcctagccagttacattccagaggatgaggcgctgatgcttcgggatggacgctttgcttgtgccatctgcccccatcgaccggtactggacaccctggccatgctgactgcccaccgtgcaggcaagaaacatctgtccagcttgcagcttttctatggcaagaagcagccgggaaaggaaagaaagcagaatccaaaacatcagaatgaattgagaagggaagaaaccaaagctgaggctcctctgctaactcagacacgacttatcacccagagtgctctgcacagagctccccactataacagttgctgccgccggaagtacagaggtcaaactccaaagtgggaagatcagtagggaacctgaacctgcggctggcccacaggccgaggagtcagcaactgtctcagcccctgcacccatgagccccacaagaagacgagccctggaccattatctcacccttcgaagctctggatggatcccagatggacgaggtcgatgggtaaaagatgaaaatgttgagtttgactctgatgaggaggaaccacctgatctccccttggactgatacccttttcccattcattcacaaataaattacaatgggtgctgagaact

SEQ ID NO: 149 - DNA, 503 bp, Homo sapiens
ggccttcgtcttccgaatgaactacagccgcaagaaccaggactcggaagttgatggtggcatcacccttgagaaggaaatctccaaagaagagctggttgccgtcctggagctctaccgggaggcacggggggcctcctcggatgtcaccaggctgctggagaccctctcccagatggagagataccagcaacattccatggtgtttctgggacggcgatcaaggaccaagagcgacctgagcctgaagatgtaccaggaggagatccaggagtggtatgaggagcatgccagggagcaagagcagcagcgacaactcagcagcagtgcagcccccgccgcccagcagcccccaggcagccgccagcgctcccagaccgttacctagcccagcgcccgaaagccgtctcttctatgcaataacacaatagtattactctactgcgatgtacggaactgcggtgtgtgtacacatactcacgtatatgcacatatttatatac

SEQ ID NO: 150 - DNA, 485 bp, Homo sapiens
ggcggcccgagctgggtcccgtgttgaccgggggcacccccgagccacccggcatgctgggccctgcagcgccccaacccttctctggccacaccaccaagtgtgaggccgactccagcgtcccacccccagggctccccctcgcagccccagatgaccctgtcattcctggcagtggctggggcacctgtgttgcgacgaggagttcccagacccctgaggctgtctgtggcctgcagagcccccagggcgccgaggtctgacctgcagcgcctgaggtctgactgtctctgcctgcagcatgccggcccctctcctgcagcccctgcccctcacctgcctgggacctgccccgcctccgcatgcatgtggatagacccccacgggccgtggccaacgcttgtccctggggccacacaggggacactggaggtcacagttatttattgatcacaaattgtggacatttaaaacagaaactgttc

SEQ ID NO: 151 - DNA, 723 bp, Homo sapiens
  misc_feature 606,666,686: n = a,t,g, or c
gggtcctcgggcatgaacgcgagcccaaagtgccagtctgcgattggaaatttccagccactttaagccagtgctgagtagggcttctgcagagccatgtttgagccaaggtcttggaaggcattgccccatgggctcaggtgactcggggtggagtgagcacgtctgcagggccctctcatacacgcctgaggcagaagcagcgtcccccgtgaaagccaccttccgaagctcctgcgttttttgcaaacttggcttcccccaggggcaggctggactttccctgcccccctatgattgaagtcctcctgcttttgggggctgccttcccagagtcccccgggtgctcccctgccgaggtcaggagctgaccaagccttggcccggtgacacctgcagccctcactcctgtcatcccaggacacttgaggcccaaggaggtggagtggagagtgggctcgggtacatgggagccagaagccagatggacttggtcaagtgtcggtcacttggagcctccagtgtgcgtcagggtctgtgggcaggggacagggcgtgggtgggggccgaggctggcacgcccctctgccctcaccgtcttggtgncctggcctcgcgcccctcccccaagtctcttctgtgcaaggcccgcctcggcctcggcngctggttcctgtcctgttttntgtgtctgaaagttttcaggttgtggtgcatcagccc

SEQ ID NO: 152 - DNA, 697 bp, Homo sapiens
tttttttttttttttgagacggagtttcactcttgcccaggctggagtgcagtggcacaatctcggcccactgcaacctccgccccccgggttcaagcgattctcctgcctcagcctcccaagcagctgggaccacaggcgcccgccaccacgcccagccaatcctttatatctttagtagagacagggtttcactgtgttagccaggctggtctcgatctcctgacctcatgatctgcccgcctcggcctcccaaagtgctgggaccacaagcttgagccaccgcacccggccaagaccctgtctttacaaaaataaaaaaaattacaaaattatccaggaatggttgcaaatgcctgtagtgtcagccactcgaccacttctaacgcagggattcaggaattgggctttcagactccttctgcagtgtcacagtccagactttttttaaatgaaggacaccccgcagtggctcacagtgggtcccagggctagcaggagcgtgctggggagccggctctgtctttgttcgcagtgggtcccggtgctggcaggagtgtgctggtgagccggctctgtctttgtaaatccttcaggggtcctacggctgactccaccggacagcccgtcctgggccgtgttaagcaccttttgtagaaatcgtatttttattaaaacatcaaatctgtgttcctgt

SEQ ID NO: 153 - DNA, 456 bp, Homo sapiens
ggctcttcctatcattgtgaagcagaattcaccaagcgttggattgttcacccactaatagggaacgtgagctgggtttagaccgtcgtgagacaggttagttttaccctactgatgattgtgttgttgccatggtaatcctgctcagtacgagaggaaccgcaggttcagacatttggtgtatgtgcttggctgaggagccaatggggcgaagctaccatctgtgggattatgactgaacgcctctaagtcagaatcccgcccaggcggaacgatacggcagcgccgcggagcctcggttggcctcggatagccggtcccccgcctgtccccgccggcgggccgcccccccctccacgcgcgcgcgcgcgggagggcgcgtgccccgccgcgcgccgggaccggggtccggtgcggagtgcccttcgtcctgggaaacggggcgcggccggaaag

SEQ ID NO: 154 - DNA, 377 bp, Homo sapiens
tgactgcagagcggtagaggtgtatatttttcatactgtggggcaaagtatttgtgctgctttttggagatggactggaacgtctggtttctgtccccgggccggcagctacgtctattttctgtagaaggtgccacagtgagacctggagccaccccttcctgccctggcgccgtttagagctgggagcccgtggactcccggcctgtttctaccttctattcaaccactctgacgtggggagacaagaagaaatagaactttttgatagtgtggtaaaaacattgatttgaactattttagtaaaaggagtaacaaacaagattgtgatagtgtctactttgagctagataaataaaggcctctttgtgagcctc

SEQ ID NO: 155 - DNA, 609 bp, Homo sapiens
  misc_feature 7,494: n = a,t,g, or c
gtttagntatttcctttatgcgattttgaacctcatccattttataagtgtaagaggcaggaggcttgacattgggtttttcaacagtctgatttaaattatcactcatttccttagtagaggttcttgagagatgcatctgcaaaggtggttgaagggacgcctttgggctaaacctgttgttggtggacatggtcacatgcctttgcactggaatgtctttgaatgcttcatttccaagagttgtgtgtagcatataaggagacatttcagcatcaggcttaactccaacagagtttcctttgtctcttaacggtgctggattaggtttttttgccaacagaaaaatttgaagcaaatcctggttgtctgagggttgcttttggttttccttctagaaaaaatggcatggttttcttcactctcatctgacaattaacttgacgcccggttttccttttagaactcctttgacgagccacaagctgagcaanttcttgcagtttctgtgcaggccatggcatagcaggtaatctcgttccggggcccacggcccgtccccgcgtctctgggcccagctcctgccgccgtctccgccagggccccgcc

SEQ ID NO: 156 - DNA, 587 bp, Homo sapiens
  misc_feature 126,213,249,261,338,441,512: n = a,t,g, or c
ttttttttttagaccaaggcctcccgagccgggaagaggtacttcattgcacgtttaatgcttcatgcagtattcagagcagagataaggggggggatggctcacaggtccacagggacgtcacanggcacaggcgggacacggcgacgtggccggggctgggcggggagggggaccccacgcatcgtaaccgccagcaggggaggggctgcnaacgagcagcctcggaccaaggacagcctccccggnacgcacgggacnggagcaacatcgggtgaactgcaatgacctcgcttgtctttcgggggaacccaggatcccctgggaagcttctctgnactggcctcaccctttcgggcctggctggctcacgtcatcactgcgggatccaagacacattttagggccaagtcggttgagcgggtcggggcgtgtggggcncgcggctggcttgacttctgctttcccccaccatccccttgccctgggtggactttctgagaggggtgtgnacggcctgctggagtcccgcgcgagcccctcccaaaggaacttcgagcccggccccccctactcgggcgtctact

SEQ ID NO: 157 - DNA, 651 bp, Homo sapiens
attattcatcacatacacaaaaagaagtgttcaccctcctgacgcagggcttgtcgtgcgcctggggcgcggccgtggctctgggcacgctctgcctgtgccgtcgccgcctgctggacggcccacggggctgggatgccagcccgggccctcggctgttggctgtggcgggcgcgctggggctgctggctagcggcttgcagctggcggctgcgctctggctgtacccgggcccaggccgcgtgggccgcttctcgtgggcctggtggggtgtccacttctggctgcgcctcctggagctgacatgggcgctcgccctggcgttggccgcggtggctgccgcgagacccaggccgcccacggagcacgcttgctgggctaagctgatgcgtctggcgtgcccggcgccgtcagaaagagcgaggtgccggagcgacccaataactgctatgcagggcccagcaacgttggtgcaggcagcttggacatcagcaagagcctcatccgcaacccggcggagagtgggcagctggccacgcccagttcaggcgcctggggctcggctgcgtcgttgggtcgcggaccccagggtggcccgggactgtcccgcaacggtgtgggaccggcgccatcgctgagcgagctggatct

SEQ ID NO: 158 - DNA, 745 bp, Homo sapiens
  misc_feature 485,488,600,709,716: n = a,t,g, or c
ccgctttctaagggggtgtggctggtctccctcctggcagagctcagacctcagggagccaagtgcctgcctctccccacccccagagaacaaccatgacaaagcacggggacattggggacatcagttggtgtggtggagatgcactggcttccaggacagagagacttcctctcctgtggggggcctcctgcttcccttccctgctctgaggatcccccgtctcagcacaggagggtggcctggaagcctgggcagataattgtccctgacctggaccttagatgttttcctggtcaccgctccaggtgtacatcattggagatgttttttcaaatgcattttcccaggcaccattctcagaacctcagttccagaatctcagggtgagacctaggaatctgaatttttttacaatgctccctggtgattctgatgttcagctatctttgaaaataattggctgagtgctgtggctcgtgccngtnatcccagcactttgggaggccgaggaggggcagatcacttgaggtcaggagttcgagaccagcctggccgacatggcgaaatcctgtctctactgaaaacacaaaaaatagnccgggtgtggtggcgcgggcctgtagtcccagctactcgggaggctgaggcatgaggatcgcttgagcccggagggtggaggttgcagtgagccaagatcacgccactncactccngcttgggtgatagagcacgactctatctc

SEQ ID NO: 159 - DNA, 668 bp, Homo sapiens
  misc_feature 106: n = a,t,g, or c
gtctgcagccccatcccaagcagggccctgggggcggatggctggccatggcaggactgggcccaaaagctgggtctcttctcgctgttcccctcctctctgctcntggggtgtccctacttggggttccttcttccagaagacctccagagccctggttagggttgtctgagtcctcggccactgcagaagctccccagcagggatgagctgtgcccagcttggggggaatgcattttgagcccctcccaggagggcacttgggccagacaagaagaagcatttccccggctgggtctggtgtttggaacgggaatgccctctctggaaagaggtttacagtggggaggtgggggttggattacggctctcctactgcggggatactcggccctcggtctccgtcctggaggactaaattaaacttacgccttcccgagaacaacaaatccgtctctcacgacacatttgcccaggccaaccccaggatgccaaaggccagagtcaggcctgcggcttcgagcttcccaaccccctcacggagagccccgccccaaacactgcggtcccaggtcgaggggagggctctcggcgcgagcgggactatcagggtgacctcacctgtgaccttcaccaccgtgaggtaccgccgcgcctgggagtcaccc

SEQ ID NO: 160 - DNA, 375 bp, Homo sapiens
cttcccttctcgcttgggaactctagtctcgcctcgggttgcaatggaccccaactgctcctgtgccgctgcaggtgtctcctgcacctgcgccagctcctgcaagtgcaaagagtgcaaatgcacctcctgcaagaagagctgctgctcctgctgccctgtgggctgtgccaagtgtgcccagggctgcatctgcaaaggggcatcggagaagtgcagctgctgcgcctgatgtcgggacagccctgctcccaagtacaaatagagtgacccgtaaaatccaggattttttgttttttgctacaatcttgacccctttgctacattcctttttttctgtgaaatatgtgaataataattaaacacttagacttg

SEQ ID NO: 161 - DNA, 774 bp, Homo sapiens
  misc_feature 733,737: n = a,t,g, or c
gtcgggggagtctgtggactcctccctcagcacccaccttctgccccagcacgacggccagccctactgccacaagccctgctatggaatcctcttcggacccaagggtgagtgtagccagggtggtccacgatgtcttccctgccctccccttccctccactgttctcccgacccaccccagcggcctccctccacaggagtgaacaccggtgcggtgggcagctacatctatgaccgggaccccgaaggcaaggtccagccctaggctacagcggctctcatgatgtgggctcacctgcgccccagaccctgcaggggcccccctgcttggctctgctgggagagtgctcagccgcccagttctgcctgcaagcccagggcgagtattggaggaggggcagccacgggcagagcacatgcccatccccgagtctctggtgtgtctgccccctctggcatcctctgggcgtccatgatcccttctgtgtctgcgtgtccgaatccccgtgtgaccctgtcccagcattttcccgccgaccctgcgtgtccccgtggcgctgtccgctctccctctcctgctgcccacccacctgccagtgttatttatgctcccttcgtgggtgatggccacgccctcaccatgtccctggcagagggcttccctccgggatcccctgcctggtgcccacactgcctcgcaagcgctcgccaccctcacgtggctcacctgntgtngacgccttgtgctgtcaataaacggtttgaggattgc

SEQ ID NO: 162 - DNA, 712 bp, Homo sapiens
gtaagatgtattaaacattgctaatgatgtatggttacaatgtataacaggttttccattgtcataactgtatggaattttcttggaggatgtcattagcttctgtttgcactgacttgtgagctgtgtgtacgctgtggtcagatttctgaatgctgtagagcacttaccagctctgaccgtgtcttgctggggccagcaggctgcgtgtgcagcggggccagctgtctcagggctgatatgtagacgtgtattctgtttacaattagttccccaactctgtggggaagaacttaagcggttttagtgttttataatatggtgaggcaatgagggtcagggcgcgtggtccctgagggagggtcttcagggcaagacccatggccctggcctggaactgtgctccccagggcgtggtgcctccctaaggggatggtcagtgttcctgggactgactgccaggccagcccgtctgcagactcctgtggtgggagttccctgggacgggaagcccctcggccccttccctccaggggcaggaactgagccagcatgggcggggccggccgagcttccaggcgtgttttctctgttaaatgtacctctgtctttaagctgtctcattttctaatcgctggcatgtcttgcctagaaaagcatttggaattgcttatgttcaattacagaaataaaatgtcttacttgccattgc

SEQ ID NO: 163 - DNA, 876 bp, Homo sapiens
cttagaaagcggccccgagtcgctctctgagacccgcaagatcttctctgggaaggccttggatgtttgggccatgggtgtgacactatactgctttgtctttggccagtgcccattcatggacgagcggatcatgtgtttacacagtaagatcaagagtcaggccctggaatttccagaccagcccgacatagctgaggacttgaaggacctgatcacccgtatgctggacaagaaccccgagtcgaggatcgtggtgccggaaatcaagctgcacccctgggtcacgaggcatggggcggagccgttgccgtcggaggatgagaactgcacgctggtcgaagtgactgaagaggaggtcgagaactcagtcaaacacattcccagcttggcaaccgtgatcctggtgaagaccatgatacgtaaacgctccttttgggaacccattcgagggcagccggcgggaggaacgctcactgtcagcgcctggaaacttgctcaccaaaaaaccaaccagggaatgtgagtccctgtctgagctcaaggaagcaaggcagcgaagacaacctccagggcaccgacccgccccccgtgggggaggaggaagtgctcttgtgagaggcagtccctgcgtggaaagttgctgggcccccgcccccggctcccccgcacgcatgcatccactgcggccggaggaggccatggagcccgagtagctgcctggatcgctcgacctcgcatgcgcgccgcgtcgcctctggggggctgctgcaccgcgtttccatagcagcatgtctacggaaacccagcacgtgtgtagagcctcgatcgtcatctctggttatttgttttttcctttgttgttttaaaggggac

SEQ ID NO: 164 - DNA, 410 bp, Homo sapiens
ggacccttataagacatggtttagaaatatttttttcccattgtgtggactgtctttgtttcttggtagtgtcctttgaagcttaaaatttttaattttcatgaagttcagtttatccattctgctcttgttgtttgtgcttttagtgtcagatctaagaaatcatagcctaatccaaggtcatgaaaatttacacatatgtcttctaagagttttataatttggtctcctatatttggatctttgatccattttgggttaatgtttgtatatagtgtggggtagaggcccagcttcatattttgcattgaaatatccagtcatcccagcataatttgttgaaaagattattctttcacccattgaattgttttagtactcatcaaaaataaattaactgtatatgagtg

SEQ ID NO: 165 - DNA, 628 bp, Homo sapiens
gtgggctcgggccgctcgccttgcccgtcttcgcttccggaggtcgctactgccgcctcagcggccccggagcgggggcgcccgggggtccttcgcccccggccacggtccccgcgccggggcttcgccgcccccagtgtccgagctggatcgtgcggacgcctggctcctccgaaaagcgcacgagacagccttcctctcctggttccgcaatggcctcctggcatcgggcatcggggtcatctccttcatgcagagtgacatgggtcgggaagcagcatatggcttcttcctgctgggcggcctgtgcgtggtgtggggcagcgcctcgtacgccgtgggcctggcggcgctgcgaggacccatgcagctgacgctggggggcgcggccgtgggcgccgggcgccgtgctggccgccagcctgctctgggcgtgcgccgtgggcctctacatggggcagctggagctggacgtggagctggtgcccgaggacgacgggacggcctccgcggaaggccctgatgaggcggggtcggccgccacccgagtgagggacagggccgtggggcctggcaggcgctggacagccccgaaggactgggacattaaacctgacctcccctgttc

SEQ ID NO: 166 - DNA, 520 bp, Homo sapiens
ccaatttgcactcccacgaatcctgttaccgtgactatctcgccatgccctccctagcactgagcgtgatctctagtatcattttccatcgttgctaatttgaacatgagcagatggagtcctattatttggggtcattaatttcgtagcaagtgcagttgaaggtgttttgcatgttcattgtgcagtgcgcgccgtagtctgcacagtttggccggcaggtgggatgaagggcggggctggcggagcgcgcccgccgcctggtaggccagttcggagcggagccaacgctatcccgggccccacggccagggggcgctgcggcccccccaatcccccgccccgtccgggctggggcggaggagcgggcggggaccaaaggttggtgtctttgcgctcggaccttcgccagaggggccgggacatcatgacggtgggagccaggctccgaagcaaggcggagagcagcctcctgcgccgcgggccccgagggcgagggcgaaccgagggggacgaggag

SEQ ID NO: 167 - DNA, 676 bp, Homo sapiens
  misc_feature 675: n = a,t,g, or c
aagaaattcagtcgaacagcccaccagttctctccatagggacctgggtcccgtgaatgctggttatctcacaccctgaggaataaagattggaatccgcactggatgctggaagttgactcggagaaaattgcgacaggagggaaatggcggctctgcaaaagttgccacactgcagaaagctggtcctgctgtgcttccttttggcgaccctgtgggaggccagggccgggcagattcgctattctgtgcgggaagagatcgacagaggctccttcgtaggcaacatcgccaaggacttgggtttggagcccctggcactggcagagcagggagtccgcatcgtctccagaggtaggtcccagctctttgctctgaacccgcgaagcggcagcttggtcactgcgaacaggatagaccgggaggagctctgcgctcagagcgcaccctgtctgttgaattttaacattctgctggaggataaattgactatttattcagtagaggtggaaataacagatattaacgataatgcccctcgctttggagtagaggaactggagctaaaaatcagtgaaaccaccccaccctcttcctgtgtctcacgcaagttttatactctaatatttatatggctttttttcttcgacaaaaaaataataaaacgttctcttnt

SEQ ID NO: 168 - DNA, 691 bp, Homo sapiens
cccagagaatgggctttgcatggagcttggctcctgtccctgcctgtgagggaggaccagactcggcctcaccacctgccactctgagcaaacaggcaacggtgtttcctgaacatctttctgaagcggctgagggatgtcagctgagcccccgctgggcctgctctggagcgggatgtctccagaagccgcccttggagcgggcacttccctatttgggcgtgtcccagtcccatgcctcaccatccccttgcttgaagctccaagagcatgagagtgggcagcctggtctgctgaggaaagtgtctgatggatgcggaaatggccaccccaaacaccggtaagcagatgttaccctgcaggcggtggctcctggggcccagccctgcagaaacacatggggcaggctgggcagaggggctcacacccgataatcccagcactttgggaggctgaggtgggaggatcgcttgagcccaggagtttgagaccagcctgggcaacatagcaagactctatctccactaaaaatcaaaacaaaacaattagctgggtatggtggcacacgcctgtggttccagctactggggaggctgagggggaggatcacttgagcccaggagttcaaggctgcagtgagccatgattgcgccactgcactccagcctgggcaacagagcaagcttagaaa

SEQ ID NO: 169 - DNA, 693 bp, Homo sapiens
tgagacgcagacttgagaattcttttcaaattcaagagcagtagtttgtctcaggagatgctggtcctgtctcactgtgagaatccctatcatagaccttcccgggcaaagccctttcccgggttcctgtctgaggagggaggtgaagcctcttgggtcctcaagcagcgattcttaccctttccctgcctgggtcactgcccatccacagcttcccggggagaacagtgacgggaactagctgaccgctcggagcctccaggccagtccctttctgtgaagactcacaaggccttactcgttgcgtaacatcccaaagccgtagttacgtcatctgtaaaatggagataaaaatcccacttcacatggttgttggggtgattaaaggagataatataggccaggcatggtggctcgcgcctgtggtcccagcaccttgggaggccgaggcgggcaaatcacctgaggtcgaaccctgaggtcgggagtttgagaccagcctgaccaacatggggaagccccgtctctactaaaaatacaaaattatctgggcgtggtggtgcatgcccgtaatcccggctgcctggggggttgaggcaggagaatcacttggacctgggaggcggaggttgcagtgagctgagatcatgccattgcactccagcctgggtgacaagagcaaacctccatctc

SEQ ID NO: 170 - DNA, 681 bp, Homo sapiens
ttttttggcaggaaatggcactttaatagttggggccagggtgacaggaccaagatggggctggcctgtgtcagtcaggaagcctccctcttctgctgggacagggccttgcggcagctcctcctccccgcctgaggtcctaggcctgccacaggccagcatgccggtgaggtcagtggcaggagccacccagaagccccgcagatgacggagctgagaacagggacttcacctccacgtgttgccatttcctcactggaaagtccttgggaggtggctgggctcagcctgagctcagggctcttcggtgggggttggggcaggggcagggcgggcacttgcaggtggcacaggcttcatcaaggcaggacacgggcttcatcaaggcaggagccacagcgcccgagccctggcaggggaggtaaggcccaggatggggcagggccgtgtgctcctggaacggacatccttctctgccagagacctgctccccaagccctgtccctcccaatccccaggcagcccactctgccctccatagatgaatctaatcccatatattacaataaactgcatttgcctctccccattgccccaccctcccctaccctgggccagcggcccccacttccttgtcctctggcggtggcaggtgcccctcctcaagcagtgccacagaaa

SEQ ID NO: 171 - DNA, 798 bp, Homo sapiens
cgaggctgagcggcaggcggatcgccccgaccctcactcctggcgtctgagtctctggcgtagcccatgctgagtgggcggctggtcctgggtctggtctccatggctggccgcgtttgtttgtgccagggcagcgcgggatccggggccatcggtccggtggaggccgccattcgcacgaagttggaggaggccctgagccccgaggtgctagagcttcgcaacgagagcggtggccacgcggtcccgcctggcagtgagactcacttccgcgtggctgtggtgagctctcgtttcgagggactgagccccctacaacgacaccggctggtccacgcagcgctggccgaggagctgggaggtccggtccatgcgctggccatccaggcacggacccccgcccagtggagagagaactctcagctggacactagccccccatgcctgggtgggaacaagaaaactctaggaaccccctgaaccccaagagagggaggaccaggatccgaatgagctgggtgagcacgaattaccgaggccttccctttgatacagtccaggatttgtaagggatgaagacccctgggccccattctgttggggtccatacatactctccgaagatagcaacttgcttcaggtcaaagtgaacccgagaaaagagaagaatcactcactactgctcttgccctggactattcaggaagggcagcccggatgttccatgttaaatcgtgacagaattgcaccagacctgatgagttggaaacaatcctatacattaaaagaaattacccc

SEQ ID NO: 172 - DNA, 697 bp, Homo sapiens
gatggcggcggcagctgtacagggcgggagaagcggtggtagcggaggctgtagtggggctggtggtgcttccaactgcgggacaggaagtggccgtagcggcttgttggataagtggaagatagatgataagcctgtaaaaattgacaagtgggatggatcagctgtgaaaaactctttggatgattctgccaaaaaggtacttctggaaaaatacaaatatgtggagaattttggtctaattgatggtcgcctcaccatctgtacaatctcctgtttctttgccatagtggctttgatttgggattatatgcacccctttccagagtccaaacccgttttggctttgtgtgtcatatcctattttgtgatgatggggattctgaccatttatacctcatataaggagaagagcatctttctcgtggcccacaggaaagatcctacaggaatggatcctgatgatatttggcagctgtcctccagtcttaaaaggtttgatgacaaatacaccttgaagctgaccttcatcagtgggagaacaaagcagcagcgggaagccgagttcacaaagtccattgctaagttttttgaccacagtgggacactggtcatggatgcatatgagcctgaaatatccaggctccatgacagtcttgccatagaaagaaaaataaagtagccaattcttaaagtg

SEQ ID NO: 173 - DNA, 735 bp, Homo sapiens
cacgacgcagacatggcagcgcagaaggaccagcagaaagatgccgaggcggaagggctgagcggcacgaccctgctgccgaagctgattccctccggtgcaggccgggagtggctggagcggcgccgcgcgaccatccggccctggagcaccttcgtggaccagcagcgcttctcacggccccgcaacctgggagagctgtgccagcgcctcgtacgcaacgtggagtactaccagagcaactatgtgttcgtgttcctgggcctcatcctgtactgtgtggtgacgtcccctatgttgctggtggctctggctgtctttttcggcgcctgttacattctctatctgcgcaccttggagtccaagcttgtgctctttggccgagaggtgagcccagcgcatcagtatgctctggctggaggcatctccttccccttcttctggctggctggtgcgggctcggccgtcttctgggtgctgggagccaccctggtggtcatcggctcccacgctgccttccaccagattgaggctgtggacggggaggagctgcagatggaacccgtgtgaggtgtcttttgggacctgccggccccccgggccagctgccccacccctgcccatgcctgtcctgcacggctttgctgctcgggcccacagcgccgtcccatcacaagcccggggagggatcccgcctttgaaaataaagctgttatgggtgtcattcaggaaccc

SEQ ID NO: 174 - DNA, 664 bp, Homo sapiens
ttgggtgtggagtttcccagcgcccctcgggtccgaccctttgagcgttctgctccggcgccagcctacctcgctcctcggcgccatgaccacaaccaccaccttcaagggagtcgaccccaacagcaggaatagctcccgagttttgcggcctccaggtggtggatccaatttttcattaggttttgatgaaccaacagaacaacctgtgaggaagaacaaaatggcctctaatatctttgggacacctgaagaaaatcaagcttcttgggccaagtcagcaggtgccaagtctagtggtggcagggaagacttggagtcatctggactgcagagaaggaactcctctgaagcaagctccggagacttcttagatctgaagggagaaggtgatattcatgaaaatgtggacacagacttgccaggcagcctggggcagagtgaagagaagcccgtgcctgctgcgcctgtgcccagcccggtggccccggccccagtgccatccagaagaaatccccctggcggcaagtccagcctcgtcttgggttagctctgactgtcctgaacgctgtcgttctgtctgtttcctccatgcttgtgaactgcacaacttgagcctgactgtacatctcttggatttgtttcattaaaaagaagcacttcc

SEQ ID NO: 175 - DNA, 829 bp, Homo sapiens
gcgggtgctagctagtcctttctcgtcgctgctcggctcgcggcccgtggggtcggccccgccaccgttgccgccatgcccatgaagggccgcttccccatccgccgcaccctgcaatatctgagccaggggaacgtggtgttcaaggactccgtgaaggtcatgacagtgaattacaacacgcatggggagctgggcgagggcgccaggaagtttgtgtttttcaacatacctcagattcaatacaaaaacccttgggtgcagatcatgatgtttaagaacatgacgccgtcacccttcctgcgattctacttagattctggggagcaggtcctggtggatgtggagaccaagagcaataaggagatcatggagcacatcagaaaaatcttggggaagaatgaggaaaccctcagggaagaggaggaggagaaaaagcagctttctcacccagccaacttcggccctcgaaagtactgcctgcgggagtgcatctgtgaagtggaagggcaggtgccctgccccagcctggtgccattacccaaggagatgagggggaagtacaaagccgctctgaaagccgatgcccaggactaaggcccacggtcactgtgggctggggtgatggtgtctgaccagtggggagattggaatgggattactttggcccagggaagcccctggttctgtccctggagactctggaaatccttttgcattaaaaggactttacacacctgtgtaaaaggatgtgggagaggagggtctgaagctgagctgctaaatgaatatccctgctctgctggtcaataaaacgcttcctaatagc

SEQ ID NO: 176 - DNA, 827 bp, Homo sapiens
ggccgctttttttttttttttttttttttttttttggcttttaagtgtttttttgtttgtttttgttttttgttttttttttggaacagtctggtccctgatgggggcctctccccctgcccctccccagtctggttacagctcagttcgtcgctctattttgagcagctccacctcgaacaccagggttgcaccgcctggaatctttgggggagctccccgctctccataccctagctcggatgggatcaccagcttgcgcttttccccctcacacatccccagcagcccctggtcccagcccttgatgacctggcctgtgccaagggagaagacaaagggctggttctggggcaggctgctgtcaaactctgtcccatcttccagcttccccgtgtagtgcatgtgcaggacatcccctttgcgcgatttgatgggacagtggtccacccgcttcttgaccccgatctgcagcttccttttgccctcggccccgtggccgtggccacggcgctcaggcagatggacagtactgtcaggacccggaaccagctcagcctcatgtctcagtccagtgagaagggggcttggccgaggaccccagcagcggggggagggggtcaggggaggccacagcagccagggacccgcccctttgctcacccccataccttccctccctcccagtccccacctccgctcttcagttcccgcctgtccctttacgcaaagtccagaccctatctggctgcactgcagttgccccaactgggcggccccactcacgccacacccagctgcccccggtccagcacaccaacacctct

SEQ ID NO: 177 - DNA, 1305 bp, Homo sapiens
gcgtcccctttccggccggtccccatggaggcgctggggaagctgaagcagttcgatgcctaccccaagactttggaggacttccgggtcaagacctgcgggggcgccaccgtgaccattgtcagtggccttctcatgctgctactgttcctgtccgagctgcagtattacctcaccacggaggtgcatcctgagctctacgtggacaagtcgcggggagataaactgaagatcaacatcgatgtactttttccgcacatgccttgtgcctatctgagtattgatgccatggatgtggccggagaacagcagctggatgtggaacacaacctgttcaagcaacgactagataaagatggcatccccgtgagctcagaggctgagcggcatgagcttgggaaagtcgaggtgacggtgtttgaccctgactccctggaccctgatcgctgtgagagctgctatggtgctgaggcagaagatatcaagtgctgtaacacctgtgaagatgtgcgggaggcatatcgccgtagaggctgggccttcaagaacccagatactattgagcagtgccggcgagagggcttcagccagaagatgcaggagcagaagaatgaaggctgccaggtgtatggcttcttggaagtcaataaggtggccggaaacttccactttgcccctgggaagagcttccagcagtcccatgtgcacgtccatgacttgcagagctttggccttgacaacatcaacatgacccactacatccagcacctgtcatttggggaggactatccaggcattgtgaaccccctggaccacaccaatgtcactgcgccccaagcctccatgatgttccagtactttgtgaaggtggtgcccactgtgtacatgaaggtggacggagaggtactgaggacaaatcagttctctgtgaccagacatgagaaggttgccaatgggctgttgggcgaccaaggccttcccggagtcttcgtcctctatgagctctcgcccatgatggtgaagctgacggagaagcacaggtccttcacccacttcctgacaggtgtgtgcgccatcattgggggcatgttcacagtggctggactcatcgattcgctcatctaccactcagcacgagccatccagaagaaaattgatctagggaagacaacgtagtcaccctcggtgcttcctctgtctcctctttctccctggcctgtggttgtcccccagcctctgccaccctccacctcctcggtcagccccagccccaggttgataaatctattgattgattgtgatagt

SEQ ID NO: 178 - DNA, 907 bp, Homo sapiens
tttttttttgtgtaaaaagagtcaacaacacaccctttaagccaagaaaaaaaatacatcaggagggacagtcacaattgagtagactgagaggaggcgtgaggggctggaccagagggccaggagggagcgaggcgtgatggggtgagggcccccctcccagcgcctggagatggggaggagtggaataggctgtgggtagcagctgctgcgagtctccaccccgaccaaagcagctgctcctcctgtgcccaggcccagcccatgctctgtggccatgcacctagcaggcacctagcgggacagtggcgtctgcttcagggacatgagcaccgagcgcaggcgggacacatctttgcactgcttgctgctcttggggttgaagtcacatagctgggccaccttctcccactctgtgcctggggtctcctccttggattccttcacgaaagcctcctcggatgccacgtagccgatgatatcagcatctggctgctggtagaatgctttgtcagcgatccggttgttgatcttgttcttctctacttgttcactctggcgctggttccactcctccaggtccttcttggccttctcccgccattcctgttccgtgaccttagatgcagcatccagctcttgcagccgtttcctctgctcctctcgccacttgcggatgctctcaggctcctgggtcagcctgtcagcctgggcaatggctgcgtagccatcagcaggaccgttggcctcctgaaacacatctccattgactgtggtccccatgtcctcagaaccagccccactcgtggggcccggctgcgcgggggccgcatggctgccggcagatgccccgaagccctcgtcgttctctatgcctgcaatctcgctctcctgctgggccaggaag

SEQ ID NO: 179 - DNA, 770 bp, Homo sapiens
atggcaggtgtcggggctgggcctctgcgggcgatggggcggcaggccctgctgcttctcgcgctgtgcgccacaggcgcccaggggctctacttccacatcggcgagaccgagaagcgctgtttcatcgaggaaatccccgacgagaccatggtcatcggcaactatcgtacccagatgtgggataagcagaaggaggtcttcctgccctcgacccctggcctgggcatgcacgtggaagtgaaggaccccgacggcaaggtggtgctgtcccggcagtacggctcggagggccgcttcacgttcacctcccacacgcccggtgaccatcaaatctgtctgcactccaattctaccaggatggctctcttcgctggtggcaaactgcgggtgcatctcgacatccaggttggggagcatgccaacaactaccctgagattgctgcaaaagataagctgacggagctacagctccgcgcccgccagttgcttgatcaggtggaacagattcagaaggagcaggattaccaaaggtatcgtgaagagcgcttccgactgacgagcgagagcaccaaccagagggtcctatggtggtccattgctcagactgtcatcctcatcctcactggcatctggcagatgcgtcacctcaagagcttctttgaggccaagaagctggtgtagtgccctctttgtatgacccttcctttttacctcatttatttggtactttccccacacagtcctttatccacctggatttttagggg

SEQ ID NO: 180 - DNA, 745 bp, Homo sapiens
ctttttttttttttttttttttttttttttgaggaaataatcaaatctatttatttacaagtgatttacagttagaaaacccaggcaggggtatgggcagggtccgaatgtgggatggcacttgggctctggcaggtcacttgtctgcacggacgaaggaggcgaagacgctgtccttccggctgagcagcttctctggcttatcgaactcaaggatggcaccccgcttcaggacgatcaccaggtctgcactcaggatggtgtgcactcgatgcgcgatggtgaccacagtgcggtctgcgaaggctgtcatcaccaccttttggaggatgttttccgtggccatgtcaatggaagccgtggcctcgtccatgatgaagatgctggtcttcctcacgaaggcccgggccaggcagaacagctgcctctgtccctggctgaaattctccccgccttctgtgatgatggcatcgaggcctcctggcagtgccttcaccaccagcttcagctgggcgatttccagggcctcccacagtgtgctatctgagcacttcctctcagggtccaggttaaatcggatggtgccgctgaagaggacggggtcctgcaggatgatggagaggcgtgagcgcagggtgtgcagcggcagtttggcgatgtcaatgccatcaatgatgatgtgcccttcgaacgtgtccaccatgcggaagaaggcaagagagaaggaggacttcccactgccggt

SEQ ID NO: 181 - DNA, 891 bp, Homo sapiens
  misc_feature 564: n = a,t,g, or c
gccgccatgccggaacggagggagctgtgtccagcctggccgctgccgctgccctgcaggatggcggggtgacacttgccagtcagatgtggatgaatgcagtgctaggaggggcggctgtccccagcgctgcgtcaacaccgccggcagttactggtgccagtgttgggaggggcacagcctgtctgcagacggtacactctgtgtgcccaagggagggccccccagggtggcccccaacccgacaggagtggacagtgcaatgaaggaagaagtgcagaggctgcagtccagggtggacctgctggaggagaagctgcagctggtgctggccccactgcacagcctggcctcgcaggcactggagcatgggctcccggaccccggcagcctcctggtgcactccttccagcagctcggccgcatcgactccctgagcgagcagatttccttcctggaggagcagctggggtcctgctcctgcaagaaagactcgtgactgcccagcgccccaggctggactgagcccctcacgccgccctgcggcccccatgcccctgcccnacatgctgggggtccagccgccacctcggggtgactgagcggaaggccaggcagggccttcctccttttcctcctccccttcctcgggaggctccccagaccctggcatgggatgggctgggattttttctgtgaatccacccctggctacccccaccctggctaccccaacggcatcccaaggccaggtgggccctcagctgagggaaggtacgagctccctgctggagcctgggacccatggcacaggccaggcagcccggaggctgggtggggcctcagtgggggctgctgcctgacccccagcacaaataaaacgaaccgtgg

SEQ ID NO: 182 - DNA, 599 bp, Homo sapiens
cacgctcaccatgatgagtgttgaccgctacatcgctgtctgccaccctgtcaaggccctggacttccgcacgcctgccaaggccaagctgatcaacatctgtatctgggtcctggcctcaggcgttggcgtgcccatcatggtcatggctgtgacccgtccccgggacggggcagtggtgtgcatgctccagttccccagccccagctggtactgggacacggtgaccaagatctgcgtgttcctcttcgccttcgtggtgcccatcctcatcatcaccgtgtgctatggcctcatgctgctgcgcctgcgcagtgtgcgcctgctgtcgggctccaaggagaaggaccgcagcctgcggcgcatcacgcgcatggtgctggtggttgtgggcgccttcgtggtgtgttgggcgcccatccacatcttcgtcatcgtctggacgctggtggacatcgaccggcgcgacccgctggtggtggctgcgctgcacctgtgcatcgcgctgggttacgccaatagcagcctcaaccccgtgctctacgctttcctcgacgagaacttcaagcgctgcttccgccagctctgccgcaagccct

SEQ ID NO: 183 - DNA, 941 bp, Homo sapiens
tttttttttttttttttttttttcgtgttccaacaaaactttatttacaaaaacaggaagcaggcacgtttggccctcagactgtaatcttcccatcactactcttaatgatactcagatgacctggctgcctgagggggctgtggccctgtctgattctctgtgagatggaaaccactctagggtctcctggtgcgctgaggctgtacacaccggcagaacagggcactgcgtttggaagtttctgaccaagtggtgacagcagagggcaaaacgtgaaggctgtgctggataaggctgaaccttcctcataagcaacaccaactgctttattccaggtcagggccaactcttccgccatgatacatacatggtccctggcgggcactgtccttactgggcccctaggagtccctgcgttgtggcctgaccaccagcccctctctggtgatggcccagttgtagttcttccgggagtccaatgctgcttccacccgtgcctccaggttctctcgggtgatgaagtttttcacctcttcctgcagctgcagcacttcccgctccttgcgctgcgcccaggcctgcacctcttcggccttgcgggcctgctccaacgcctgccgctgctcctgctcccgctcctcctgccgcagcctcgctatccgcagctcgtgcagccgccggttctccgcctggttccaggccatcagctcgcggtgctcggcggcgtccttcagggccttgcgctccgccagaaccccggctcgggcctcgtgcaccttcctctgcacctcggacacgaactccatcctgagggcgcgcacggtctggcggtagtgctggtaacgctccatcagcacgaagaactccgcagggtccaccgcgggcggcatgttcactcgctcgatcttggatttggccagcgggtcgtggcgggtctt

SEQ ID NO: 184 - DNA, 785 bp, Homo sapiens
accgcccagcagccagtgggttcccgcgcgtgccgagactctgaggccttgcacccccacgatcccgtacgatggccgtcaagaagatcgcgatcttcggcgccactggccagaccgggctcaccaccctggcgcaggcggtgcaagcaggttacgaagtgacagtgctggtgcgggactcctccaggctgccatcagaggggccccggccggcccacgtggtagtgggagatgttctgcaggcagccgatgtggacaagaccgtggctgggcaggacgctgtcatcgtgctgctgggcacccgcaatgacctcagtcccacgacagtgatgtccgagggcgcccggaacattgtggcagccatgaaggctcatggtgtggacaaggtcgtggcctgcacctcggctttcctgctctgggaccctaccaaggtgcccccacgactgcaggctgtgactgatgaccacatccggatgcacaaggtgctgcgggaatcaggcctgaagtacgtggctgtgatgccgccacacataggagaccagccactaactggggcgtacacagtgaccctggatggacgagggccctcaagggtcatctccaaacatgacctgggccatttcatgctgcgctgcctcaccaccgatgagtacgacggacacagcacctacccctcccaccagtaccagtagcactctgtccccatctgggagggtggcattctgggacatgaggagcaaaggaagggggcaataaatgttgagccaagagcttcaaattactcc

SEQ ID NO: 185 - DNA, 377 bp, Homo sapiens
gccagtctcctggagatgcttgaggatcggtcctccccagaaccaggccaggacgttgcccctggggcctggtgaccctgtgaggtcgggtcccccagattgacgtctgagtgtgggcaagtgtgtcaaaaggggctgccccccaggggagatgaggctgagagcagggagttgaggccgaagaagtcaaggcccctcccgcaaatgtgtacccctgcccgcgccactgcaccccgccgcacccccacctcccccgggggccctgctgcggatgccggagtgggagagtctctgagctgtgagattgatcttgcccctaattggagaggaagccgggcgccaagacacacggggctcctgccttgggagccagggcc

SEQ ID NO: 186 - DNA, 848 bp, Homo sapiens
gccgcttttttttttttttttttttttttttttttgggaaataaacactcagttctttatattttttaatcaagtaggaaacacagttcatataatggtattactttttgtattttttttgtttttagcagctgcttactgttttatatggtggataaagtggacaacatccagcgatgggtggcaagtcaagaagagaaactgtcagttggtggaggttctgtgggtggtgctcccttggagttaacaggtttttttttttttttaactttttaactttttattttctctctttctttacagtatattttctgtgtgtgtggctgtgtgtgtgtgtgtatgcatgtgtgtgtgtgtgggggtttcattcagtttgatcaatcttcttccccttcttcctcaccctgcagtagcagggtggcagcggcggtctcctcctgctgctgctgttgctgctggtgaagctgctcacaggcagcccgcttctccctctgcttctcttgaatcttcttcatctcctccgagtacttgcagaaggtgtgtccgaacttggcccacaccttgtagggcacggtgatggagttgcgataggtgggcttcacctcgctcactcgcataaacacgccgtacttgttggagcccacatcgaagaagaagcgcttgttgtccacagtcaaggaggtgccctcgggcagctcggccggctcctcctccactccgtagtcgtcgatgagcttggccagagcgtcacggaactcgatgagcccctgcgcgggcagcgcaatggtctggccctgcgtggagcccaggccaggcccccggttgaccgtctggcggatgcgcaggaa

SEQ ID NO: 187 - DNA, 644 bp, Homo sapiens
aggctgagggcacatcttgcccttcccctctcagacatggcttccttattgctggaagaggaggcctgggagttgacattcagcactcttccaggaataggacccccagtgaggatgaggcctcagggctccctccggcttggcagactcagcctgtcaccccaaatgcagcaatggcctggtgattcccacacatccttcctgcatcccccgaccctcccagacagcttggctcttgccccttacatgatactgagccaagccctgcctgttggccaagccctgagtggccactgccaagctgcggggaagggtcctgagcaggggcatctgggaggctctggctgccttctgcatttatttgccttttttctttttctcttgcttctaaggggtggtggccaccactgtttagaatgacccttgggaacagtgaacgtagagaattgtttttagcagagtttgtgaccaaagtcagagtggatcatggtggtttggcagcagggaatttgtcttgttggagcctgctctgtgctccccactccatttctctgtccctctgcctgggctatgggaagtggggatgcagatggccaagctcccaccctgggtattcaaaaacggcagacacaacatgttcctcc

SEQ ID NO: 188 - DNA, 849 bp, Homo sapiens
cttagaaagcggccgctttttttttttttttttttttttttttttaccccagggcaaatatgttaatttaccaaaagcacacacccccccccccagcatgcactgcctggggagagggcagggccagggccccacacacccgagaccctcaggggcagcaggagggacggggccagggcagggaccgggcagggccggaagccaccctgcccccaccccccacaccaatacccagcaagtgggtgggggatggaggggtagtaccccttctccacgttttgaccgcatgtccagtcggttcatgtactcctgcaaggccttcaggcgtgcgtctatttcggccatgtcagccgcctggtgctccgagctgtactctttgatggggacccagcccccggagttggccagagatttctgatggtggctgcgttccacggggggagacttcatattggacccactccagggcgttgggctgggaggcttcccacggcggcggtgaccccctctggagagcgactcagagaaatcctccaaatcgctgcaggagctggcagacgagcagcggctgcggaaactgtccactgaggagctgcggtttcgggagcggttaggggcgtcccctcggccagtcaaggcagcagggggccgggtctggcgagaccaggagacggacggaccgtccccgcttcccccactgcctaagcggttccgctgctgctgcttcatctggatctctctctgcttcctttccttggctttcacaaaggccgtggagtcgaagcggagcgcgcgaccacctgtgggcgagggcgaggggcgcgcagggcggccccgagccccggtccc

SEQ ID NO: 189 - DNA, 686 bp, Homo sapiens
atttcagaggatggactaaatttcctaggatttccattaagaattaagaaaaaagctctaagcacgcagggtagccagacagacatggatatgagatggcactgtgaaaactcgcagaccacagatgacatccttgtggcctcagcagagtgtcccagcgatgatgaggacattgacccctgtgagccgagctcagccaacccaacccgagcaggcggcagagagccgtatccaggctcagcagaagtgatccgggagtccagcagcaccacgggtatggtcgttgggatagtagccgctgccgccctgtgcatccttatcctcctctatgccatgtacaagtacagaaaccgggatgaaggctcataccatgtggacgagagtcgaaactacatcagtaactcagcacagtccaatggggctgttgtaaaggagaaacaacccagaagtgcgaaaagctccaacaaaaataagaaaaacaaggataaagagtattatgtctgatcccaagatcttaaatggacacttgtatagaaatagtcttcattttatctgagacataatataaacttatttactttcctttttatgaagcacatacaaaagaagacagagaatgcaatcaggaaggaaagactttttaaaaaataaaaacaagtatctcatgctcttgtttctccaaaaag

SEQ ID NO: 190 - DNA, 782 bp, Homo sapiens
tcccacaccactggcaccaggccccggacacccgctctgctgcaggagaatggctactcatcacacgctgtggatgggactggccctgctgggggtgctgggcgacctgcaggcagcaccggaggcccaggtctccgtgcagcccaacttccagcaggacaagttcctggggcgctggttcagcgcgggcctcgcctccaactcgagctggctccgggagaagaaggcggcgttgtccatgtgcaagtctgtggtggcccctgccacggatggtggcctcaacctgacctccaccttcctcaggaaaaaccagtgtgagacccgaaccatgctgctgcagcccgcggggtccctcggctcctacagctaccggagtccccactggggcagcacctactccgtgtcagtggtggagaccgactacgaccagtacgcgctgctgtacagccagggcagcaagggccctggcgaggacttccgcatggccaccctctacagccgaacccagacccccagggctgagttaaaggagaaattcaccgccttctgcaaggcccagggcttcacagaggataccattgtcttcctgccccaaaccgataagtgcatgacggaacaataggactccccagggctgaagctgggatcccggccagccaggtgacccccacgctctggatgtctctgctctgttccttccccgagcccctgccccggctccccgccaaagcacccctgcccactcgggcttcatcctgcacaataaactccggaagcaagtc

SEQ ID NO: 191 - DNA, 772 bp, Homo sapiens
ctttatttaaaatagatttaatttaggaaagctcattttatatgagtttccaactaattattagagtcagaaacaaagaaaataaaatcagagaaaatcctctgtagaaaaaatacacaaagaacatttctacatgtgaaaaaacagtaaacagtgttaacatccaagttattagtctcaattccacgtctcctagtgaacaccactatcaaccttgagatctgatttgttcttgtcattcttcactgagtagatgaaatatgttaaggtgtctttttcattcactggaatagacctaaagtggcaaccaactatctcaacaagttgtgctttattaagtcctggtctggttggtagcttgaagtgtcttttgtatctcctaagtgtatttacttgtaattggtataaatcaacctctggggtatcaatatcttgaacaggtgaatcacctccatcatcatcactcccttttctctttcttctgtttcgaacactctgaattaagtttttatgataatcacatatgtaaagatgccttgcgctcttatccagctcgatcttcaccttcttctgggagatgctcttctggatcctcttgctgaagctggcgttgcctgccgcccggccgcaccgctcaccatcctcccgcaggcagcacagttgcccggggcccggcccggccgcccccgggggcccagccgctgagaccgcccccgcgcccggcacctcagccccggtgcccgcgccggtcccgttccccgccgaggcggcg

SEQ ID NO: 192 - DNA, 774 bp, Homo sapiens
ctctcccacaccactggcaccaggccccggacacccgctctgctgcaggagaatggctactcatcacacgctgtggatgggactggccctgctgggggtgctgggcgacctgcaggcagcaccggaggcccaggtctccgtgcagcccaacttccagcaggacaagttcctggggcgctggttcagcgcgggcctcgcctccaactcgagctggctccgggagaagaaggcggcgttgtccatgtgcaagtctgtggtggcccctgccacggatggtggcctcaacctgacctccaccttcctcaggaaaaaccagtgtgagacccgaaccatgctgctgcagcccgcggggtccctcggctcctacagctaccggagtccccactggggcagcacctactccgtgtcagtggtggagaccgactacgaccagtacgcgctgctgtacagccagggcagcaagggccctggcgaggacttccgcatggccaccctctacagccgaacccagacccccagggctgagttaaaggagaaattcaccgccttctgcaaggcccagggcttcacagaggataccattgtcttcctgccccaaaccgataagtgcatgacggaacaataggactccccagggctgaagctgggatcccggccagccaggtgacccccacgctctggatgtctctgctctgttccttccccgagcccctgccccggctccccgccaaagcaaccctgcccactcgggcttcatcctgcacaataaactcc

SEQ ID NO: 193 - DNA, 771 bp, Homo sapiens
accaggccccggacacccgctctgctgcaggagaatggctactcatcacacgctgtggatgggactggccctgctgggggtgctgggcgacctgcaggcagcaccggaggcccaggtctccgtgcagcccaacttccagcaggacaagttcctggggcgctggttcagcgcgggcctcgcctccaactcgagctggctccgggagaagaaggcggcgttgtccatgtgcaagtctgtggtggcccctgccacggatggtggcctcaacctgacctccaccttcctcaggaaaaaccagtgtgagacccgaaccatgctgctgcagcccgcggggtccctcggctcctacagctaccggagtccccactggggcagcacctactccgtgtcagtggtggagaccgactacgaccagtacgcgctgctgtacagccagggcagcaagggccctggcgaggacttccgcatggccaccctctacagccgaacccagacccccagggctgagttaaaggagaaattcaccgccttctgcaaggcccagggcttcacagaggataccattgtcttcctgccccaaaccgataagtgcatgacggaacaataggactccccagggctgaagctgggatcccggccagccaggtgacccccacgctctggatgtctctgctctgttccttccccgagcccctgccccggctccccgccaaagcacccctgcccactcgggcttcatcctgcacaataaactccggaagcaagtcagtg

SEQ ID NO: 194 - DNA, 835 bp, Homo sapiens
catggagccggcggaaggggtggtgtagggccgggcgataatggcggcgtcgaggctggagctaaacctggtgcggctgctatcccgctgcgaggcgatggcagcggagaaacgggacccggacgagtggcgcctggagaagtacgtgggagccctagaggacatgttgcaggccctgaaggtccacgcgagcaaaccggcctctgaggtgatcaatgaatattcctggaaggtggattttctgaaggggatgctgcaagccgagaagctgacctcctcctcagagaaagcactggccaaccagttcctggcccctggccgtgtgccaaccacagccagagagcgagtgcccgccacaaagacggtgcatctgcagtcacgggcgcggtacaccagcgagatgcggagtgagctactaggcacggactctgcagagcctgagatggacgtaaggaagagaactggagtggcagggtcccagccagtgagtgagaagcagtcggcagctgagctagacctcgtcctgcagcgacatcagaacctccaggaaaagctggcggaagagatgctaggactggcccggagcctcaagaccaataccctggccgcccagagtgtcatcaagaaggacaaccagaccctgtcacactcactgaaaatggcggaccagaacctggagaaactgaagacggagtcagagcgtctggagcagcacacgcagaagtcagtcaactggctgctctgggccatgctcattatcgtctgcttcatcttcattagcatgatcctcttcattcgaatcatgcctaaactcaaataaagacccccgcccacc

SEQ ID NO: 195 - DNA, 602 bp, Homo sapiens
ttagtacgccgctggcacctttactctcgccggccgcgcgaacccgtttgagctcggtatcctagtgcacacgccttgcaagcgacggcgccatgagtctgacttccagttccagcgtacgagttgaatggatcgcagcagttaccattgctgctgggacagctgcaattggttatctagcttacaaaagattttatgttaaagatcatcgaaataaagctatgataaaccttcacatccagaaagacaaccccaagatagtacatgcttttgacatggaggatttgggagataaagctgtgtactgccgttgttggaggtccaaaaagttcccattctgtgatggggctcacacaaaacataacgaagagactggagacaatgtgggccctctgatcatcaagaaaaaagaaacttaaatggacacttttgatgctgcaaatcagcttgtcgtgaagttacctgattgtttaattagaatgactaccacctctgtctgattcaccttcgctggattctaaatgtggtatattgcaaactgcagctttcacatttatggcatttgtcttgttgaaacatcgtggtgcacatttgttttaaac

SEQ ID NO: 196 - DNA, 835 bp, Homo sapiens
ttttcccccaaacacgtgccctctgaactccatagacgctatactttccttgaagaaatgttacagtcacacagacagtgtctggagtcttcagcttgattgatattggctgatatgtcaaaggtgtcatccaacagttctcatttataaatatatatagagagaggtttgttttttaatgtagcccgttcagcatcctgccctgtgcgagtcctggtctcccccgggggacgctcccgccggcgctcagtacgggcgattggcgtctttgggccgcttcagctgcaccttgagcctcttcatgccgatctggaagccgttcatggcctggatggcggtctgcgcgctggccgggttgtcgaagctcacgaagccaaagcatttactttggttagtcgcccgatccacaaacactttcgaggagatgacattaccgaaagggaggaacatctgcatcagctcagcgtccccaaactcctggggcagatggtagatgaacaggttacagccctcgggcccttctctctgctgctgggggatcattggaggcggctgaggaaaggcctggcttatctgaccataggcagcagggtaggcaggacctgcatactgctgcactccggcgtaggcctgctgcagggggtccgcggcggtggggctctgtgctgggtaggggtggatgccattggcgaacacagcttccgcagcaggttgcccattggcctgtggggggaggccggtgaagccattcaccccaatgggggatgggatgctaggcacagctggtgcagtgatgcccggaggggtgctgccacctgaggttggggtcataggt

SEQ ID NO: 197 - DNA, 842 bp, Homo sapiens
ggacaccgagttccccgtgttggcctccaggtcctgtgcttgcggagccgtccggcggctgggatcgagccccgacaatgggcaacgcgcaggagcggccgtcagagactatcgaccgcgagcggaaacgcctggtcgagacgctgcaggcggactcgggactgctgttggacgcgctgctggcgcggggcgtgctcaccgggccagagtacgaggcattggatgcactgcctgatgccgagcgcagggtgcgccgcctactgctgctggtgcagggcaagggcgaggccgcctgccaggagctgctacgctgtgcccagcgtaccgcgggcgcgccggaccccgcttgggactggcagcacgtgggtccgggctaccgggaccgcagctatgaccctccatgccctggccactggacgccggaggcacccggctcggggaccacatgccccgggttgcccagagcttcagaccctgacgaggccgggggccctgagggctccgaggcggtgcaatccgggaccccggaggagccagagccagagctggaagctgaggcctctaaagaggctgaaccggagccggagccagagccagagctggaacccgaggctgaagcagaaccagagccggaactggagccagaaccggacccagagcccgagcccgacttcgaggaaagggacgagtccgaagattcctgaaggccagagctctgacaggcggtgccccgcccatgctggataggacctgggatgctgctggagctgaatcggatgccaccaaggctcggtccagcccaataccgctggaagtgaataaactccggagggtcggacggg

SEQ ID NO: 198 - DNA, 749 bp, Homo sapiens
ctgctgcaggagaatggctactcatcacacgctgtggatgggactggccctgctgggggtgctgggcgacctgcaggcagcaccggaggcccaggtctccgtgcagcccaacttccagcaggacaagttcctggggcgctggttcagcgcgggcctcgcctccaactcgagctggctccgggagaagaaggcggcgttgtccatgtgcaagtctgtggtggcccctgccacggatggtggcctcaacctgacctccaccttcctcaggaaaaaccagtgtgagacccgaaccatgctgctgcagcccgcggggtccctcggctcctacagctaccggagtccccactggggcagcacctactccgtgtcagtggtggagaccgactacgaccagtacgcgctgctgtacagccagggcagcaagggccctggcgaggacttccgcatggccaccctctacagccgaacccagacccccagggctgagttaaaggagaaattcaccgccttctgcaaggcccagggcttcacagaggataccattgtcttcctgccccaaaccgataagtgcatgacggaacaataggactccccagggctgaagctgggatcccggccagccaggtgacccccacgctctggatgtctctgctctgttccttccccgagcccctgccccggctccccgccaaagcaaccctgcccactcgggcttcatcctgcacaataaactccggaagcaagtcagt

SEQ ID NO: 199 - DNA, 440 bp, Homo sapiens
ttctgcttggacttaagggcatcatcaggcaggttttgggtaggatagcaggggaggcagagacatagtcggggtcagtggtcatgagtgtggctttgagcccaaaaacttggtttctgttccctactttgccactcagtagtgcatgactttggccaaatttcttaaattcatgaagcaagtttccgggtgaatgaaatggggataaaaatagtgttcaaacctatccaaacaacaaagcataatatttcgcccactaagccaatcactttattgactcctagccgcagacctcctcattctaacctgaatcggaggacaaccagtaagctacccttttaccatcattggacaagtagcatccgtactatacttcacaacaatcctaatcctaataccaactatctccctaattgaaaacaaaatactcaaatgggcct

SEQ ID NO: 200 - DNA, 829 bp, Homo sapiens
tcatccacgttacttgaagaactccctggtttaccacccacagctgcgagcacaggtttggcgctacctgacatacatcttcatgcatgcagggatagaacacctgggactcaatgtggtgctgcagctgctggtgggggtgcccctggagatggtgcatggagccacccgaattgggcttgtctacgtggccggtgttgtggcagggtccttggcagtgtctgtggctgacatgaccgctccagtcgtgggctcttctggaggggtgtatgctctcgtctctgcccatctggccaacattgtcatgaactggtcaggcatgaagtgccagttcaagctgctgcggatggctgtggcccttatctgtatgagcatggagtttgggcgggccgtgtggctccgcttccacccgtcggcctatcccccgtgccctcacccaagctttgtggcgcacttgggtggcgtggccgtgggcatcaccctgggcgtggtggtcctgaggaactacgagcagaggctccaggaccagtcactgtggtggatttttgtggccatgtacaccgtcttcgtgctgttcgctgtcttctggaacatctttgcctacaccctgctggacttaaagctgccgcctcccccctgagggctggaggcccaaggtcggggaggggagggaaaagcagcacccacagggagcgcctgcgaggtttcttctcatcaccagctcagctaggccgggcagacaaggacagaagactctgggccactgtaatgtttgtgtttagatttggacacacagtggagcccctttacagaaacggcctctcggcgg

SEQ ID NO: 201 - DNA, 459 bp, Homo sapiens
actgaccttcaacgttgggcagatcctgctcatctctgattacttctatgccttcctgcggcgggagtactacctcacacatggcctctacttgaccgccaaggatggcacagaggccatgctcgtgctcaagtaggcctggctggcacagggctgcatggacctcagggggctgtggggccagaagctgggccaagccctccagccagagttgccagcaggcgagtgcttgggcagaagaggttcgagtccagggtcacaagtctctggtaccaaaagggacccatggctgactgacagcaaggcctatggggaagaactgggagctccccaacttggacccccaccttgtggctctgcacaccaaggagccccctcccagacaggaaggagaagaggcaggtgagcagggcttgttagattgtggctacttaataaatgttttttgttatgaagtct

SEQ ID NO: 202 - DNA, 388 bp, Homo sapiens
tgtccccgcgctgctggtcccggggtccctgaaccgcgggcggccccgctccctctgctggccatggcccccccgcccgcgtgccggtccccgatgtcaccgccgccgccgctgctgctgctgctgctgctgagtctggcgctgctgggcgcccgggcccgcgccgagcccgccgggagtgccgtccccgcgcagagccgcccatgcgtggactgccacgccttcgagttcatgcagcgcgccctgcaggacctgcggaagacagcctgcagcctggacgcgcggacggagaccctactgctgcaggcagagcgccgtgccctgtgtgcctgctggccagcggggcactgaggaccacgctgctccgtgtgaataaatgcccagtggc

SEQ ID NO: 203 - DNA, 646 bp, Homo sapiens
agcgctggtgcggagactgcttccggactccaggtaccgcgcttggcggcagctggccccagacttctgtcttttcagctgcagtgaaggctcggggctgcagaattgcaaccttgccaatggacctgatcggttttggttatgcagccctcgtgacatttggaagcatttttggatataagcggagaggtggtgttccgtctttgattgctggtctttttgttggatgtttggccggctatggagcttaccgtgtctccaatgacaaacgagatgtaaaagtgtcactgtttacagctttcttcctggctaccataatgggtgtgagatttaagaggtccaagaaaataatgcctgctggtttggttgcaggtttaagcctcatgatgatcctgagacttgtcttgttgctgctctgagcatctggaggaacagaaaactaagttcatgtcatcctgctgtaatgggcagagcatattttttttgtatttaaaagataaacttcaatatggaatgctagaaacacaaatagcactgtcacctctaatatgaacattagtttgaggtagtttttttctaaagcaaaaattttaactgttttctaattgtcaagcactattttcattaaaagtgtctaatgaatcat

SEQ ID NO: 204 - DNA, 618 bp, Homo sapiens
cccaaggccgacgccagcacgccgtcatggcccccgcagcggcgacgggggtcagcaccctgcccagtggcttctcggtcttcaccaccttgcccgacttgctcttcatctttgagtttatcttcgggggcctggtgtggatcctggtggcctcctccctggtgccctggcccctggtccagggctgggtgatgttcgtgtctgtgttctgcttcgtggccaccaccaccttgatcatcctgtacataattggagcccacggtggagagacttcctgggtcaccttggacgcagcctaccactgcaccgctgccctcttttacctcagcgcctcagtcctggaggccctggccaccatcacgatgcaagacggcttcacctacaggcactaccatgaaaacattgctgccgtggtgttctcctacatagccactctgctctacgtggtccatgcggtgttctctttaatcagatggaagtcttcataaagccgcagtagaacttgagctgaaaacccagatggtgttaactggccgccccactttccggcataactttttagaaaacagaaatgcccttgatggtggaaaaaagaaaacaaccacccccccactgccc

SEQ ID NO: 205 - DNA, 725 bp, Homo sapiens
ttttttggccagtcacagctttattaatgaccagggtaacccgttcagctagggagctcctcaatgagagttcttggggcaggtggcacggggcctccccaaagccgctccagctccccagtgagggcggccacctcctcggctaccacagcatgggcttggtgagccctggcgcagtctagagccaggggtgtgagggccgcctcattttcgttggtccaggccaggaggaactggcactttttccgggcccggtaaagatgatctcgctcttctctagccacggcctgtttccgggcacggcccagggtctgtgccaggtcccccagtgctgccagcgtgtagcctttctggttggtcgggccctcgcccagcaggatgcgggcgacctcgtgcatagcccctcgtgtgcccaggggccccggcgggtgctcgcctgcttccagcacgtggctgccgcctgcagggcttcttccgcagaggcgaagacttgctgggcacccagggctccggaaacgccgagcagtgtggcacagaagtcagagagcagcgcgtcgtcaccgccgtgatacagggcgagagtatgcgcgtaggcgaacagcacattgggcagctggaagcgcacgagcggcgagactgggccgcggctcaggctgactatcgcggggatgcgggtgggtacgacgggcgtgcaggcccccgggacatctccaagaacccgctcg

SEQ ID NO: 206 - DNA, 835 bp, Homo sapiens
caggccgggttcggcggttgctgtgagagcgggcttcccaacaccatgccgtccgccttctctgtcagctctttccccgtcagcatcccagccgtactcacgcagacggactggactgagccctggctcatggggctggccaccttccacgcgctctgcgtgctcctcacctgcttgtcctcccgaagctacagactacagatcgggcactttctgtgtctagtcatcttagtctactgtgctgaatacatcaatgaggcggctgcgatgaactggagattattttcgaaataccagtatttcgactccagggggatgttcatttctatagtattttcagccccactgctggtgaatgccatgatcattgtggttatgtgggtatggaagactttgaatgtgatgactgacctgaagaatgcacaagagagaagaaaggaaaagaaaaggagaaggaaagaagactgaggggcagcagctgcttggagtttgcgtccttcccgtccacccagtgcagctcccagtgctgcagtgtgcgtggcgtgggcatccttccagctgactcatggtttgaaaaaccgttgttttatttaaatatccacagtggtagggcacacactgaagttggcttttcagccagcactgaatgtatccatcaggacatgcgtcttcaggtgcctgatctttgtagtcaggctgtgggaacggtctctgcagagcttcataactgggaatttgatttgaagaagtccatgtcatatgtgtaactagtactaattataaatataaaatacccaatataaaatatgaaactcaataaacagtgccacctgtc

SEQ ID NO: 207 - DNA, 784 bp, Homo sapiens
acaccactggcaccaggccccggacacccgctctgctgcaggagaatggctactcatcacacgctgtggatgggactggccctgctgggggtgctgggcgacctgcaggcagcaccggaggcccaggtctccgtgcagcccaacttccagcaggacaagttcctggggcgctggttcagcgcgggcctcgcctccaactcgagctggctccgggagaagaaggcggcgttgtccatgtgcaagtctgtggtggcccctgccacggatggtggcctcaacctgacctccaccttcctcaggaaaaaccaagtgtgagacccgaaccatgctgctgcagcccgcggggtccctcggctcctacagctaccggagtccccactggggcagcacctactccgtgtcagtggtggagaccgactacgaccagtacgcgctgctgtacagccagggcagcaagggccctggcgaggacttccgcatggccaccctctacagccgaacccagacccccagggctgagttaaaggagaaattcaccgccttctgcaaggcccagggcttcacagaggataccattgtcttcctgccccaaaccgataagtgcatgacggaacaataggactccccagggctgaagctgggatcccggccagccaggtgacccccacgctctggatgtctctgctctgttccttccccgagcccctgccccggctccccgccaaagcacccctgcccactcgggcttcatcctgcacaataaactccggaagcaagtcagtgg

SEQ ID NO: 208 - DNA, 792 bp, Homo sapiens
tcgctctcccacaccactggcaccaggccccggacacccgctctgctgcaggagaatggctactcatcacacgctgtggatgggactggccctgctgggggtgctgggcgacctgcaggcagcaccggaggcccaggtctccgtgcagcccaacttccagcaggacaagttcctggggcgctggttcagcgcgggcctcgcctccaactcgagctggctccgggagaagaaggcggcgttgtccatgtgcaagtctgtggtggcccctgccacggatggtggcctcaacctgacctccaccttcctcaggaaaaaccagtgtgagacccgaaccatgctgctgcagcccgcggggtccctcggctcctacagctaccggagtccccactggggcagcacctactccgtgtcagtggtggagaccgactacgaccagtacgcgctgctgtacagccagggcagcaagggccctggcgaggacttccgcatggccaccctctacagccgaacccagacccccagggctgagttaaaggagaaattcaccgccttctgcaaggcccagggcttcacagaggataccattgtcttcctgccccaaaccgataagtgcatgacggaacaataggactccccagggctgaagctgggatcccggccagccaggtgacccccacgctctggatgtctctgctctgttccttccccgagcccctgccccggctccccgccaaagcacccctgcccactcgggcttcatcctgcacaataaactccggaagcaagtcagcc

SEQ ID NO: 209 - DNA, 373 bp, Homo sapiens
gcttcggcgactcctcgtcaccgcggttccagggcgggcgcgtggcgagggcggtgcctgggggcaggggcctcctcggagggcggcggggacagacccgtcgccccggctccgcagccccgccccggccccgcctccgctccggccgccgaaggctataagatctaggaacccgagccggtggtagggcgggcgcggaccgtgctgggagcggcgcggctggagcgcagcgccgaagggactggcagggctgaagtgtgcgggacagcaagcccccgaatagccccggctgccacctcgcaggacccaaggccacgcgcgccgggcccagctgagccgcctcatgaagccgcccgcggcgcagggcagcccc

SEQ ID NO: 210 - DNA, 827 bp, Homo sapiens
aaataggagccctgggggcagagctcctggccggtcctgagccctccctcccaggcacccagcactttaagcctgctccatggaggcagagaggcccggcaagcacagccactgtgacggggagtccaggcgcaggagggacctggggccacaaggcgctgcgggcccaggtgtgctgggcccctctcaggggcactggcctctctgcagggccttccgcccagcgctggccttaatgctaaagccaaatgcagcttctgctgtgcgacgcactcctggccatcttgccgtgtcaccccctgtccggcctccacttgccatgggggatggatggatttagggtgggagggcctgtgggggccctggacagtcacaacccagcaagcaataaatgggcaagtttggaggagccccgagtggcccaagagtcccccacacacagatgaataagcttgccttccggagaacctgtccacattgccgggaacaccctggtggggccactggtgggtgccagggacgggttggggccactctggggagggctttttggttttttattccacgctgtgctgtttggatgggagccccacggaggcgggtcctggacccaccccacccccacgcctggacgctcgctctggtgggggcacgcgcgggtgggggtggttgtgggtgcgggtgtgtgcgggggtgtggggggcgcgggggtgtggcttggctggccctgcacccaggccggggaggctcaggttcgccactttactcggaccgatgcacagtcttccctttttacacttttttattaaacataattgcattttttt

SEQ ID NO: 211 - DNA, 606 bp, Homo sapiens
ttgtttttgttctgagctccataagaactgtgctgacttggaaggtgccctgtgctatgtcgtgcctgcagggacacgtcggatcccgtgggcctcacatgccaggtcaccaggtcaccgtctccttccacccctgcagtgtgctgttgtgcacgtcagggacgctgttctctatgcccactgccctcctccctctcctggcccagcagtattgctcacgggggctccagccgccggcgtggccctcatgagctacgcctgggtcttctgcagactcatgcagccctatggccgctcagaccaaggcgcagagcaactatcagggcagctctgcctcctcctcccatgaggtggggagaggcaacagggcagcccccagaggagtgtcctggccgctgtcctcccggggcccatgatggccatagatttgccttgtggtgttggatcaggtactgtgtctgctcataagtacttgtgtcatccagaatgttttgttttttaagaaaattgaattacttgtttcctgaaatattctgaggttaatatgttagttttcatagaacattgagaggcccctgccactttcaataaagacctgacttggtg

SEQ ID NO: 212 - DNA, 588 bp, Homo sapiens
catgaagaggaaggagaaaacgaaataactataggtgcagagcccaaggagaccaccgaggacgcggctcctccgggccccaccagcgagacaccggagctggctacggagcagaagcctatccaggaccctcagcccacgccttccgcaccagccatgggggctgctgaccagctagcatctgcaagggaggcctctcaggaattgcctcctggctttctctacaaggtggaaacactgcatgattttgaggcagcaaattctgatgaacttaccttacaaaggggtgatgtggtgctggtggtcccctcagattcagaagctgatcaggatgcaggctggctggtgggagtgaaggaatcagactggcttcagtacagagaccttgccacctacaaaggcctctttccagagaacttcacccgacgcttagattagggcaacaagtactgcaagaaggagctcagttacggggtttttaaaccttcatgaaaacctgaagagttcacttttgttattatgctcttaatgatttacagactgatgccagacaaaccttgggaagatgtatcaatggagcatgtgtgc

SEQ ID NO: 213 - DNA, 894 bp, Homo sapiens
tttttttttccacaacacaccctttaagccaagaaaaaaaatacatcaggagggacagtcacaattgagtagactgagaggaggcgtgaggggctggaccagagggccaggagggagcgaggcgtgatggggtgagggcccccctcccagcgcctggagatggggaggagtggaataggctgtgggtagcagctgctgcgagtctccaccccgaccaaagcagctgctcctcctgtgcccaggcccagcccatgctctgtggccatgcacctagcaggcacctagcgggacagtggcgtctgcttcagggacatgagcaccgagcgcaggcgggacacatctttgcactgcttgctgctcttggggttgaagtcacatagctgggccaccttctcccactctgtgcctggggtctcctccttggattccttcacgaaagcctcctcggatgccacgtagccgatgatatcagcatctggctgctggtagaatgctttgtcagcgatccggttgttgatcttgttcttctctacttgttcactctggcgctggttccactcctccaggtccttcttggccttctcccgccattcctgttccgtgaccttagatgcagcatccagctcttgcagccgtttcctctgctcctctcgccacttgcggatgctctcaggctcctgggtcagcctgtcagcctgggcaatggctgcgtagccatcagcaggaccgttggcctcctgaaacacatctccattgactgtggtccccatgtcctcagaaccagccccactcgtggggcccggctgcgcgggggccgcatggctgccggcaggtgccccgaagccctcgtcgttctctatgcctgcaatctcgctctcctgctgggccaggaag

SEQ ID NO: 214 - DNA, 383 bp, Homo sapiens
ctgtaaggcagcaaggtagcgtggccggcgcccgagctggggttgtgtccctgctgggctgccgttccagctggactgccgccatggaactcagcgccgaatacctccgcgagaagctgcagcgggacctggaggcggagcatgtggaggtggaggacacgaccctcaaccgttgctcctgtagcttccgagtcctggtggtgtcggccaagttcgaggggaaaccgctgcttcagagacacaggctggtgaacgcgtgcctagcagaagagctcccgcacatccatgcctttgaacagaaaaccctgaccccagaccagtgggcacgtgagcgacagaaatgagggactgggatctgcacagccattaaattataaatctgg

SEQ ID NO: 215 - DNA, 644 bp, Homo sapiens
tttttttttttggaaataatcaaatctatttatttacaagtgatttacagttagaaaacccaggcaggggtatgggcagggtccgaatgtgggatggcacttgggctctggcaggtcacttgtctgcacggacgaaggaggcgaagacgctgtccttccggctgagcagcttctctggcttatcgaactcaaggatggcaccccgcttcaggacgatcaccaggtctgcactcaggatggtgtgcactcgatgcgcgatggtgaccacagtgcggtctgcgaaggctgtcatcaccaccttttggaggatgttttccgtggccatgtcaatggaagccgtggcctcgtccatgatgaagatgctggtcttcctcacgaaggcccgggccaggcagaacagctgcctctgtccctggctgaaattctccccgccttctgtgatgatggcatcgaggcctcctggcagtgccttcaccaccagcttcagctgggcgatttccagggcctcccacagtgtgctatctgagcacttcctctcagggtccaggttaaatcggatggtgccgctgaagaggacggggtccttcgaacgtgtccaccatgcggaagaaggcaagagagaaggaggacttcccactgccggt

SEQ ID NO: 216 - DNA, 892 bp, Homo sapiens
cctggttggtacacatagcttctccagacccacccacccactctttcctgagccctgtgcttcggatggcggcgggaggttgatggcgagtggtgctgaagggacagctccagcagtggctgatttgggggagaaacaaaatctgcagatggaatccgagcagggcgacttcaccttcaagtggtgagctctcctgacctgcggccagtctccactccattcacggccagccgatctgcccgctcccggaggggtcgggcagtgccggctggacccgccccgagctccatggtttgcccaaccctgcgcgatggtgactctgggcgcggaggttggcgactggcaaatccgcagatcacagaatgaaggcggggagcgcggccggcggccggcgggggctttctcccccaccccagcgcccagggaagcggctcaaccacctgaatccggaaaacgccaacaagtagtttctcgtcggagaagggcggctcacctgggcgccaagactcagtcccgctgcccagagaacctcgtccactcggaaaccaaagcagaaccacttttctctcggtctcgttaagtcatgtctgagtcacagagatgggcaagatcgagaacaacgagagggtgatcctcaatgtcgggggcacccggcacgaaacctaccgcagcaccctcaagaccctgcctggaacacgcctggcccttcttgcctcctccgagcccccaggcgactgcttgaccacggcgggcgacaagctgcagccgtcgccgcctccactgtcgccgccgccgagagcgcccccgctgtcccccgggccaggcggctgcttcgagggcggcgcgggcaactgcagttcccgcggcggcagggccagcgaccatcccggtg

SEQ ID NO: 217 - DNA, 792 bp, Homo sapiens
tctttagcttcctaggacccattgtgaacctcagcgagcccaccgcccatgaggggtccacagtgaccgtgagttgcatggctggggctcgagtccaggtcacgctggacggagttccggccgcggccccggggcagccagctcaacttcagctaaatgctaccgagagtgacgacggacgcagcttcttctgcagtgccactctcgaggtggacggcgagttcttgcacaggaacagtagcgtccagctgcgagtcctgtatggtcccaaaattgaccgagccacatgcccccagcacttgaaatggaaagataaaacgagacacgtcctgcagtgccaagccaggggcaacccgtaccccgagctgcggtgtttgaaggaaggctccagccgggaggtgccggtggggatcccgttcttcgtcaacgtaacacataatggtacttatcagtgccaagcgtccagctcacgaggcaaatacaccctggtcgtggtgatggacattgaggctgggagctcccactttgtccccgtcttcgtggcggtgttactgaccctgggcgtggtgactatcgtactggccttaatgtacgtcttcagggagcaccaacggagcggcagttaccatgttagggaggagagcacctatctgcccctcacgtctatgcagccgacagaagcaatgggggaagaaccgtccagagctgagtgacgctgggatccgggatcaaagttggcgggggcttggctgtgccctcagattccgcaccaataaagccttcaaactccct

SEQ ID NO: 218 - DNA, 520 bp, Homo sapiens
gcccaagatctggccatcgcagctgctggtggtcatcatgatctgcgtggccctcgtggtgctcccactgcagttcgaggagctcgtctacctctggatggagcggcagaagtcagggggcaactacagccgccaccgtgcgcagacggagaagcacgtggtcctgtgtgtcagctccctcaagatcgaccttctcatggacttcctgaacgagttctacgcccacccccggctccaggactattacgtggtcatcctgtgccccacggagatggatgtccaggtgcgcagagtcctgcagatccctctgtggtcccagcgggtcatctacctccagggctctgcactcaaagaccaggacctcatgcgagccaagatggacaatggggaggcctgcttcatcctcagcagcaggaacgaggtggaccgcacggctgcagaccaccagaccatcctgcgcgcctgggccgtgaaggacttcgcccccaactgccccctctacgtccagatcctcaaacct

SEQ ID NO: 219 - DNA, 797 bp, Homo sapiens
ccgacccctactcggcggcgcaactccacaaccagtacggccccatgaatatgaacatgggtatgaacatggcagcagccgcggcccaccaccaccaccaccaccaccaccaccccggtgcctttttccgctatatgcggcagcagtgcatcaagcaggagctaatctgcaagtggatcgaccccgagcaactgagcaatcccaagaagagctgcaacaaaactttcagcaccatgcacgagctggtgacacacgtctcggtggagcacgtcggcggcccggagcagagcaaccacgtctgcttctgggaggagtgtccgcgcgagggcaagcccttcaaggccaaatacaaactggtcaaccacatccgcgtgcacacaggcgagaaacccttcccctgccccttcccgggctgtggcaaagtcttcgcgcgctccgagaacctcaagatccacaaaaggacccacacaggggagaagccgttccagtgtgagtttgagggctgcgaccggcgcttcgccaacagcagcgacaggaagaagcacatgcacgtccacacctccgataagccctatctctgcaagatgtgcgacaagtcctacacgcaccccagctcgctgcggaagcacatgaaggtccatgagtcctccccgcagggctctgaatcctccccggccgccagctccggctatgagtcgtccacgcccccggggctggtgtcccccagcgccgagccccagagcagctccaacctgtccccagcggcggcggcagcggcggcggcggctgcggcggcg

SEQ ID NO: 220 - DNA, 809 bp, Homo sapiens
gccgcttttttttttttttttttttttttttttttggtttggtgttaggtgtgccttttattaaccaggatacagcaggatttatgttattattatcccatctctgccttttaataggtgaattttatccacattgactctgatacattacacttttgggcttatttgtaccatttccttttgtgctatctacttacctttcactttctttgcttttttgctgtgttctgttggattgacaaaggattctgcatttttctttttcttcctttttttcaactcctctactttctccttcttttcctccaaatcattctattcttcctccttcttttgattcctctggcactgcagcactgcagtccacatccttctcctatccctttccctctgctcaacaactactacttccattgtgtccagaggtacttatcccctcctgtgttgtgttgtcttcctctcttttccttcttctacagcaactctccaggactgcagaggtggtttcatgaagggttccctggccacatggcccaactaagagatgatgccaacatgtctggtgctgtaggggaaatgatcagagcagtgagcatctggggagattttaatgttcccgcagcccgaggtgcgggagccctcggacggactccggcccgccccgcagtccccagcgcgcgcgctgcggccccggctgacgacgagtcgagaaagtcactcgcgatgaccgcggacgcgaggggcgggccgcgtcgcgccgccccgcggaggcgccgcaaacttttcccggttcgcaagttgccgggctc

SEQ ID NO: 221 - DNA, 445 bp, Homo sapiens
tgaaaaatgccgtcggtttcgaaagcggcggcagcggcgctgagcgggtcccccccgcagacggagaagccgacccactacaggtacctgaaggagttcaggacggagcagtgccccctgttttcacagcacaagtgcgcgcagcaccggccgttcacctgcttccactggcacttcctcaaccagcggcgccgcaggcccctccgcaggcgcgacggcaccttcaactacagccccgacgtgtactgctccaagtacaacgaagccaccggcgtgtgccccgacggcgacgagtgtccctacctgcaccggacgacgggggacacagaacgcaagtaccacctgcgttactacaaaacaggaacctgcatccacgagacagacgcacgtggccactgcgtgaagaatgggctgcactgtgccttcgcgcacggccccctggact

SEQ ID NO: 222 - DNA, 469 bp, Homo sapiens
cagagcccggcccgacgccgccatgagcgccgcgctcttcagcctggacggcccggcgcgcggcgcgccctggcctgcggagcctgcgcccttctacgaaccgggccgggcgggcaagccgggccgcggggccgagccaggggccctaggcgagccaggcgccgccgcccccgccatgtacgacgacgagagcgccatcgacttcagcgcctacatcgactccatggccgccgtgcccaccctggagctgtgccacgacgagctcttcgccgacctcttcaacagcaatcacaaggcgggcggcgcggggcccctggagcttcttcccggcggccccgcgcgccccttgggcccgggccctgccgctccccgcctgctcaagcgcgagcccgactggggcgacggcgacgcgcccggctcgctgttgcccgcgcaggtggccgcgtgcgcacagaccgtggtgagcttg

SEQ ID NO: 223 - DNA, 831 bp, Homo sapiens
ctccaggggggacggcaggccaagagcgcggcgcccgggcctggcgcggagcctgagcccgccggacgggaggcggccccgccgcgggctcggccccggccccagccccgccagcatggccggccggactgtacgggccgagacccggagccgggccaaggatgacatcaagaaggtgatggcgaccatcgagaaggtccggagatgggagaagcgatgggtgactgtgggcgacacttcccttcgtatcttcaagtgggtgccagtggtggatccccaggaggaggagcgaaggcgggcaggtggcggggcagagagatcccgtggccgggaacgtcggggcaggggcgccagtccccgagggggtggcctctcatcctgctggatcttaatgatgagaacaagcaaccagagtttccattcggaaggttcctgcaaaagggcacagagcccaatcctgggggcaccccccagcccaaccgcctgtgtcacctgccggaccccagaaggggtccctgaggaggctcagcccccacggttggccaagaaagagatcccgggggcatacttgttgcacgcaccgacgaacccccaatgctgaccaaggaggagcctgttccagaactgctggaagatgaggcccccgaagcttaccctgtctttgagccagtgccacctgtccctgaggcagcccagggtgacacagaggactcggagggtgcccccccactcaagcgcatctgcccaaatgcccctgacccctgaaaagccggcctgcctgtcctgttgccccaggggcccctttggctttttacaaataaagaccctttt

SEQ ID NO: 224 - DNA, 401 bp, Homo sapiens
ggagagagatggtgtacgcatcgcgggagtcctcgcccacgcggcgcctcaacaacctgtcaccagcgccgcacctggcatccggctcgccgccgcccgggctgccgtcggggctgccgtccgggctgcagtccggttcgccgtcgcgttcgcgcctatcgtacgccggggggcgcccgccttcgtacgccggcagcccggtgcaccacgcggccgagaggctgggaggcgccccggccgcccagggcgtcagccccagccccagcgccatcctggagcggcgcgacgtgaagccggacgaggacctggcgagcaaggcgggcggcatggtgctggtgaaaggcgagggcctctatgctgacccctacgggctgctgcacgagggccgtctgagcctggcc

SEQ ID NO: 225 - DNA, 735 bp, Homo sapiens
gctgcaggagaatggctactcatcacacgctgtggatgggactggccctgctgggggtgctgggcgacctgcaggcagcaccggaggcccaggtctccgtgcagcccaacttccagcaggacaagttcctggggcgctggttcagcgcgggcctcgcctccaactcgagctggctccgggagaagaagcggcgttgtccatgtgcaagtctgtggtggccctgccacggatggtggcctcaacctgactccaccttcctcagaaaacagtgtgagacccgaaccatgtgctgcacccgcggggtcctcggtcctacagctacggagtcccactggggcagcacctactccgtgtcagtggtggagaccgactacgaccagtacgcgctgctgtacagccagggcagcaagggccctggcgaggacttccgcatggccaccctctacagccgaacccagacccccagggctgagttaaaggagaaattcccgccttctgcaaggcccagggcttcacagaggataccattgtcttcctgccccaaaccgataagtgcatgacggaacaataggactccccagggctgaagctgggatcccggccagccaggtgacccccacgctctggatgtctctgctctgttccttccccgagcccctgccccggctccccgccaaagcacccctgcccactcgggcttcatcctgcacaataaactccggaagcaagtcagtt

SEQ ID NO: 226 - DNA, 862 bp, Homo sapiens
gccgagtgcgagggacgagcggagtaaaatctccacaagctgggaacaaacctcgtcccaactcccacccaccggcgtttctccagctcgatctggaggctgcttcgccagtgtgggacgcagctgacgcccgcttattagctctcgctgcgtcgccccggctcagaagctccgtggcggcggcgaccgtgacgagaagcccacggccagctcagttctcttctactttgggagagagagaaagtcagatgccccttttaaactccctcttcaaaactcatctcctgggtgactgagttaatagagtggatacaaccttgctgaagatgaagaatatacaatattgaggatatttttttctttttttttttcaagtcttgatttgtggcttacctcaagttaccatttttcagtcaagtctgtttgtttgcttctttcagaaatgttttttacaatctcaagaaaaaatatgtcccagaaattggagtttactggtgcttgtatttggactcatttggggattgatggttactgcactatacttttcaacaaccaagacatcaaagcagtgtccaagttacgtgagcaaatactagacttaagcaaagatatgttaaagcttttagcagaggaaaataagacccagtggatgtcgagacggtgcttctatggcaggatatggtaagataaccgtagaatatttctagtttcctccaatccctgtttaaagatggttttggaaattgaacttattacttcatgcataggtctttgcaaagtaattttttcttgactttttattatgaaaatttcaaatgtactgaaaaatagagatactatgataaatacgtacatattcatc

SEQ ID NO: 227 - DNA, 460 bp, Homo sapiens
gccgcacctgcgcctggcaggcggccggctctgcccagcccctacccacggccccggccccgcaccgggacacatggaagctgccagccccccagccaaggatcagctgagccctagggctgatgcttgcctacgttgctgagaatggcactgaggcccagccaacaaaggttaacccaggacactcctggacagtgatcctgatgtctgttgtgagctgcacactcaagggtgtgataaccagccccagtcggcgccatggcgtctgccgagcccctgacggcgctgtcccgctggtacctgtatgccatccacggctacttctgcgaggtgatgttcacagcggcctgggagttcgtggtgaacttgaactggaagttccctggggtcacgagcgtgtgggccctcttcatctacggcacctccatcctcatcgtggagcgcatgtacctgcggctgc

SEQ ID NO: 228 - DNA, 892 bp, Homo sapiens
cttgtgcctcttgggagacgtccacccgtttccaagcctgggccactggcatctctggagtgtgtgggggtctgggaggcaggtcccgagccccctgtccttcccacggccactgcagtcacccctgtctgcgccgctgtgctgttgtctgccgtgagagcccaatcactgcctatacccctcatcacacgtcacaatgtcccgaattcccagcctcaccaccccttctcagtaatgaccctggttggttgcaggaggtacctactccatactgagggtgaaattaagggaaggcaaagtccaggcacaagagtgggaccccagcctctcactctcagttccactcatccaactgggaccctcaccacgaatctcatgatctgattcggttccctgtctcctcctcccgtcacagatgtgagccagggcactgctcagctgtgaccctaggtgtttctgccttgttgacatggagagagccctttcccctgagaaggcctggccccttcctgtgctgagcccacagcagcaggctgggtgtcttggttgtcagtggtggcaccaggatggaagggcaaggcacccagggcaggcccacagtcccgctgtcccccacttgcaccctagcttgtagctgccaacctcccagacagcccagcccgctgctcagctccacatgcatagtatcagccctccacacccgacaaaggggaacacacccccttggaaatggttcttttcccccagtcccagctggaagccatgctgtctgttctgctggagcagctgaacatatacatagatgttgccctgccctccccatctgcaccctgttgagttgtagttggatttgtctgtttatgcttggattcaccagagtgactatgatagt

SEQ ID NO: 229 - DNA, 421 bp, Homo sapiens
ccgcggcggcctcagcgaggaccctccgccccggagccgccggccggagccgcagcctctgccgcagcgcccccgccacctgtcccctccccctccgcctccgccggagccgcctcgtgcactctggggtatggccgtcaatgtgtactccacatctgtgaccagtgaaaatctgagtcgccatgatatgcttgcatgggtcaacgactccctgcacctcaactataccaagatagaacagctttgttcaggggcagcctactgccagttcatggacatgctcttccccggctgtgtgcacttgaggaaagtgaagttccaggccaaactagagcatgaatacatccacaacttcaaggtgctgcaagcagctttcaagaagatgggtgttgacaaaatcattcctgtagagaaattagtg

SEQ ID NO: 230 - DNA, 605 bp, Homo sapiens
ttttttttttagctggcaaaggcgtttaatagaaatgagatgagggcaggccgcccctcccccgcccagctagcgcaggaagttcctggggtagagctggaagagctttccctcctgtgtgggctcgaagccgtacttttccaggttgtcagggtcgaaggtaccgtccttgaagtccttttcgatggcaggcgccacggcttcgctgaagagctgcgcggccgtcagggcgtctcctcgctctcaggggcgaggtagctcacgtagggcttgagcttgaagccggtcagatccgggacgacgaactccgggaccatctccttgatctgcacgaacctccagcccgaggtgaggaaacccgatgcccttggcgccccggcccttgcggcccctgaagctgcgcgggccccgcttgctcgtccacttgctcattcggtccgcaccccggaccaggcagcgcgccgctgcggccaggacgcccatgccgcgccctggaccggagaccccacacgagctccaagcggccccggctccggcgccaacccggcctcgaccttgctccgcttccgaccgctgcgtcgcagcaagagcggctccgattggcc

SEQ ID NO: 231 - DNA, 649 bp, Homo sapiens
cgcttttttttttttttttttttttttttttttgcgatggagtttcgctcctgttgcccaggctggagtgcaatggtccaatctcaggtgactgcaacctccccctcccaggttcaagcgattctcgtgcctcagcctccctagtagctgggattacaggcgctcgccatcatgcctggctaactttgtatttttagcagagacggggtttcaccatgctgcccaggctggtctcgaactcctgacgtcaggtgatccacctgcctcggcctccaaaagtgctgggattacagatgtgagccactgcgcccggcctgcttcagattttaatcaccctcagttggagctgcttccccggggccactcctcgcactccacatcctgcaactctgtgacttctaccttcaaattcgtcctctcaccctggacctggaaaagcaggtgaggacccatgaacaacccgtggtcagtccctgggtagccctcctggcctgtgcagagccccgcttgggggtcctgcgtgggcccaggacaggcggagggtgcacagtgacagtcacggaagcggatgccatcacagtggtgatggagaacactgcaggcctcaggcggctcggctctggccggggttgacagatcagctgctgcg

SEQ ID NO: 232 - DNA, 339 bp, Homo sapiens
tgctcggggcagggtgccggggggtaggaggcagcgccgagcggctggaagagagtgtggtgtgatggacgggcagcttcctgtgtgctccaagggatgagcctcgtggggcagagggcccggggccgccgcctggcctgggagtccctccctggtttttattctcagtacctcaggctcccctgtgtacttggaggggcagggagccctttcctcggttctggcctccagaccagggtaagggcaggcccctccaacaggtgctcacagccaccgaggcaggggctgcagccacccactgggagtcttgtttttatttataataaaattgttggggac

SEQ ID NO: 233 - DNA, 665 bp, Homo sapiens
tctacagactcccacaccactggcaccaggccccggacacccgtctgctgcaggagaatggctactcatcacacgctgtggatgggactggccctgctgggggtgctgggcgacctgcaggcagcaccggaggcccaggtctccgtgcagcccaacttccagcaggacaagttcctggggcgctggttcagcgcgggcctcgcctccaactcgagctggctccgggagaagaaggcggcgttgtccatgtgcaagtctgtggtggcccctgccacggatggtggcctcaacctgacctccaccttcctcaggaaaaaccagtgtgagacccgaaccatgctgctgcagcccgcggggtccctcggctcctacagctaccggagtccccactggggcagcacctactccgtgtcagtggtggagaccgactacgaccagtacgcgctgctgtacagccagggcagcaagggccctggcgaggacttccgcatggccaccctctacagactccccagggctgaagctgggatcccggccagccaggtgacccccacgctctggatgtctctgctctgttccttccccgagcccctgccccggctccccgccaaagcaaccctgcccactcgggcttcatcctgcacaataaactccggaagcaagtc

SEQ ID NO: 234 - DNA, 355 bp, Homo sapiens
gggggtgtcatggatggacacacctctccacaattccttcaggcatggactggaactttcctcctctaggccgggccctgccctagtgcccacccccgcccccgcccccgcccaaccccaactcactggcactcaagccccctacccctgcagtgcctttcacttctttttttccccagaaatccggggcgggggggtggggggttggtagggatgagtcctgtcaagggggccacaggagaggaggggacaggctctcaggaatcctttattcttgtagtaataataatactaacaaacagttggggaactagggagaaaaccagaccattaaaactgtttgtggtcgaatctc

SEQ ID NO: 235 - DNA, 672 bp, Homo sapiens
accaccgtgagcagtcatggcgtactccacagtgcagagagtcgctctggcttctgggcttgtcctggctctgtcgctgctgctgcccaaggccttcctgtcccgcgggaagcggcaggagccgccgccgacacctgaaggaaaattgggccgatttccacctatgatgcatcatcaccaggcaccctcagatggccagactcctggggctcgtttccagaggtctcaccttgccgaggcatttgcaaaggccaaaggatcaggtggaggtgctggaggaggaggtagtggaagaggtctgatggggcagattattccaatctacggttttgggatttttttatatatactgtacattctatttaaggtaagtagaatcatcctaatcatattacatcaatgaaaatctaatatggcaataaaaatcattgtctacattaaaacttcttatagttcataaaattatttcaaatccatcatctctttaaatcctgcctcctcttcatgaggtacttaggatagccattatttcagtttcacataagaaatgtttactcaatgtttaagtgttttgccccaaaattcacaactaacaaggcagaactaggacttgaacatggatcttttggttcttaatccagtgagtgatacaattcaatgcactcccctgtc

SEQ ID NO: 236 - DNA, 769 bp, Homo sapiens
cccgacctctaccctcatgaagagaggctcagagggctgaagtgcctatttggccgaaagccgtggcagagtggcaaggggcgcggatttaaaaggatcgaaggcagccccggagcccagcggccgggaggcgcgcccgaacgaagccgcggcccgggcacatccatggcccggcgggcggggggcgctcggatgttcggcagcctcctgctcttcgccctgctcgctgccggcgtcgccccgctcagctgggatctcccggagccccgcagccgagccagcaagatccgagtgcactcgcgaggcaacctctgggccaccggtcacttcatgggcaagaagagtctggagccttccagcccatccccattggggacagctacccacacctccctgagggaccagcgactgcagctgagtcatgatctgctcggaatcctcctgctaaagaaggctctgggcgtgagcctcagccgccccgcaccccaaatccaggaggctgctggtacaaatactgcagaaatgacaccaataatggggcagacacaacagcgtggcttagattgtgcccacccagggaaggtgctgaatgggaccctgttgatggccccatctggatgtaaatcctgagctcaaatctctgttactccattactgtgatttctggctgggtcaccagaaatatcgctgatgcagacacagattatgttcctgctgtatttcctgcttccctgttgaattggtgaataaaaccttgctctttccatcc

SEQ ID NO: 237 - DNA, 868 bp, Homo sapiens
agtggcctgtggcatcgtcatgacccttgtgcctgggcgtcccaaagatgtggccaacttcttcctactgttgctggtgttggctgtgctcttcttccaccagctggtcggtgatcctctcaaacgctacgcccatgctctggtgtttggaatcctgctcacttgccgcctgctgattgctcgcaagcccgaagaccggtcttctgagaagaagcctttgccagggaatgctgaggagcaaccctccttatatgagaaggcccctcagggcaaagtgaaggtgtcatagaaaagtggaagtgcaaagagtggaccttccaggcagttgcgtccatgacaccaggaagatgtcagtgtgtgtttttcatttgatttatttatcttggggaaagtgaaaaatgtaatctgcaagttaatgaccctattggcttgtgtacatctatatgctaaaatgacttccccacattgacatttgtgcgccacctttaatcactctggggcaactctcacatcttgctgcatgtacatgtatacggctactattgaagtgtaattgtgagatggactccaacaagcatgtgactgtgagattgtgtgtgggaaaatgtatttaactactctgtgtgtgtgtgtgtgtgtgtgtgcgcgcgcgcgcgcacgcgcacacactcacgcacacacaagcagagaaggcgctgatcttgaactaatcctgcacaggcatccttccctttatagattgattccagcaaaggcggaataaaacaaatttcctatgaagagaatcctgatatgaaacaagtcatgtagtctcatggccgggaatctctccacagatactaacaacttaaacttactactttaggag

SEQ ID NO: 238 - DNA, 525 bp, Homo sapiens
ttggaccctggggctcacaccatccccaaggtgtcactttctccttctcaccctctccccgaggtcacatgctccatcccctggggtcattgatgggcagccttgccgctcacctccctgtacctccaacaaccccaccccttccccactgtttctctcctcagctggtggctgggggtcagttccgggtggtcaaggagcccctcggctttgtgaaggtgctgcaatgggtcttcgccatcttcgcctttgccacatgcggcagctacagtggggagctccagctgagcgtggattgtgccaacaagaccgagagtgacctcagcatcgaggtcgagttcgagtaccccttcaggctgcaccaagtgtactttgatgcacccacctgccgagggggcaccaccaaggtcttcttagttggggactactcctcgtcagccgaattctttgtcaccgtggccgtgtttgccttcctctactccatgggggctctggccacctacatcttcctgcagaacaagtacc

SEQ ID NO: 239 - DNA, 512 bp, Homo sapiens
acttccggccagcgcagccattttggcttcctgaccttgggctacggctgaccgttttttgtggtgtactccgtgccatcatgtccgtcctgacgccgctgctgctgcggggcttgacaggctcggcccggcggctcccagtgccgcgcgccaagatccattcgttgccgccggaggggaagcttgggatcatggaattggccgttgggcttacctcctgcttcgtgaccttcctcctgccagcgggctggatcctgtcacacctggagacctacaggaggccagagtgaaggggtccgttctgtccctcacactgtgacctgaccagccccaccggcccatcctggtcatgttactgcatttgtggccggcctcccctggatcatgttattcaattccagtcacctcttctgcaatcatgacctcttgatgtctccatggtgacctccttgggggtcactgaccctgcttggtggggtcccccttgtaacaataaaatctatttaaactct

SEQ ID NO: 240 - DNA, 500 bp, Homo sapiens
gccgagcgcatcgcagggaggacccgagggcgccggggccggggggcggcgctccggcccggcccggccccgcccgatgtccatgagcgcgaacaccatgatcttcatgattctgggggcgtcggtcgtgatggccatcgcgtgcttgatggacatgaacgcgctgctggaccgattccacaactacatcctcccgcactgcggggcgaggaccgcgtctgccactgcaactgtggccggcaccatatccactacgtgatcccgtacgacggggaccagtcggtggtggacgcctccgagaactactttgtgacggacagtgtgaccaagcaggagatcgacctcatgctggggctgctgctgggcttttgcatcagctggttcctggtgtggatggacggcgtcctgcactgcgccgtgcgcgcctggagagccggacggcgctacgatggctcgtggacctggctgcccaagctgtgcagcctgcgggagctgggccg

SEQ ID NO: 241 - DNA, 815 bp, Homo sapiens
tgtcggggctgcagcggcgggagggagcccagtggaggcgccctcccgaagcgccactgcccatgctgaccacccagccctccggctgctgatgtcatgagtaacaccactgtgcccaatgccccccaggccaacagcgactccatggtgggctatgtgttggggcccttcttcctcatcaccctggtcggggtggtggtggctgtggtaatgtatgtacagaagaaaaagcgggtggaccggctgcgccatcacctgctccccatgtacagctatgacccagctgaggaactgcatgaggctgagcaggagctgctctctgacatgggagaccccaaggtggtacatggctggcagagtggctaccagcacaagcggatgccactgctggatgtcaagacgtgacctgacccccttgccccacccttcagagcctggggtcctggactgcctggggccctgccatctgcttcccctgctgtcacctggctccccctgctgggtgctgggtctccatttctccctccaccaccctcagcagcatttgcttcccatgccctcaccatcaccttactggccccaggccttttgccctttgtgggtgttgagctcaccgcccacccacaggcactcatgggaagaggctttccttttgggatggcggcggctggtaaacacctttgctttctctagccctcctgggctgggcttgggcacaaatccccaggcaggctttggagttgtttccatggtgatggggccagatgtatagtattcagtatatattttgtaaataaaatgttttgtggctaggg

SEQ ID NO: 242 - DNA, 881 bp, Homo sapiens
atatgctttatgactgtgttgtctgccctgctatcagagttgtttaaatttccccttggtccttttggcagtgacatctgactcttgagttatagccactgagatctctctaagtgctcttgactcttgacttgtgtcattatgttttgttgcccctaagtcaagggtacaagtaattatacatggaattggtgtgaagtactcacagcaaagactgcaggtgggctctgggaggcctgactgggttggggacagtgaatgcagaggtggggacgggacccagcccgtggcaggagagggcggctgtggttttggaggaatgagttttcaggggggtggacgctgtgagaaatatgataggcaaccagtgggtggtggggtgggggggttcttactgcttgccattgcttagcaggagggacagtctagtggagataaaataccatcaggcttcacagcacagttttattattttcttcaacagcatgtggcccaggagtgggctagagtctgcataggagaaatcttaagttctagttaagtataccttatcctaagtgcttgggatcagagtgttagggcattcagaattttttgaggttttggaatatctacatatacataaatgagatatcttgggaatgggactcaagtctaaatgctaaatttatgtttcatatataacttatttatgtttcatatatatatagcccgaaggtaatttcatataatatttttaataatatgtgtgacccatcacatgaggttggatgtggaatttttcacttgtagtgctcaagttttggattcggagcattttggattttggagttttgaattagggattcttagcctgtatttctgtactgtggtcccataag

SEQ ID NO: 243 - DNA, 912 bp, Homo sapiens
ggctgcgcccggattccggtccgcagggagaccgaagggcacagctccccgcgccgcgcacgccgcccgagcccggagtgcggacacccccgggatgcttgcgccccagaggacccgcgccccaagcccccgcgccgcccccaggcccacccggagcatgctgcctgcagccatgaagggcctcggcctggcgctgctggccgtcctgctgtgctcggcgcccgctcatggcctgtggtgccaggactgcaccctgaccaccaactccagccattgcaccccaaagcagtgccagccgtccgacacggtgtgtgccagtgtccgaatcaccgatcccagcagcagcaggaaggatcactcggtgaacaagatgtgtgcctcctcctgtgacttcgttaagcgacactttttctcagactatctgatggggtttattaactctgggatcttaaaggtcgacgtggactgctgcgagaaggatttgtgcaatggggcggcaggggcagggcacagcccctgggccctggccggggggctcctgctcagcctggggcctgccctcctctgggctgggccctgatgtctcctccttcccacggggcttctgagcttgctcccctgagcctgtggctgccctctccccagcctggcgtggctggggctgggggcagccttggcccagctccgtggctgtggcctgtggctctcactcctcccccgacgtgaagcctccctgtctctccgccagctctgagtcccaggcagctggacatctccaggaaaccaggccatctgggcaggaggcctggggatgagggtggggggggacccccaggtcccggaggggaagtgaagcaacagcccagctggaagggcgtcttctgcggagaaataaagtcacttttgagtccc

SEQ ID NO: 244 - DNA, 564 bp, Homo sapiens
ttttttttttttttttttttttttggggggctctctgtatcctttatctccggcagggtcagcggccctccagggcccggtctcgagcgatgactgcctcctcgaacttgatcatgagcgtggtgcccttgtgccagtgcgccgtgaccttggcagggaagccgctgtgtgtgagcaccgcctccacgatgcccgccgtgaagctggcgcagttgagcgtgctgttctccttgggcacggagatgtaggtgttgatgagcggctcgcgctcgatgatgtagaaggtgcgcgcgtcatcgttggcctgctccagcttgtctgcctccttgccgaagagcgccttccacacggcgcccttgacgaagagcaacgcgcctagcaccttggtctcacgccgggcacccttttcgcgcgccaccagcgcatccagcacgcgcgcgcccacctggcggcccagcgcggccaggcgcgcctgcagctcggccacggagaagacgcggctctggcagtgctgtaccagctcggagaacagcagtgcgaaggcgctcaggctcacctcggtgc

SEQ ID NO: 245 - DNA, 781 bp, Homo sapiens
ggccccgacgcctctgttctcggaatccgggtgctgcggattgaggtcccggttcctaacgaatctctgctggattggccgtaaccctgtccccgagcgggctcacagggtctgaaggccacgcatgaggcaaaggtaaagttctgagccacccggtgcctccttcccaggactgcaagatggaggaaggcgggaacctaggaggcctgattaagatggtccatctactggtcttgtcaggtgcctggggcatgcaaatgtgggtgaccttcgtctcaggcttcctgcttttccgaagccttccccgacataccttcggactagtgcagagcaaactcttccccttctacttccacatctccatgggctgtgccttcatcaacctctgcatcttggcttcacagcatgcttgggctcagctcacattctgggaggccagccagctttacctgctgttcctgagccttacgctggccactgtcaacgcccgctggctggaaccccgcaccacagctgccatgtgggccctgcaaaccgtggagaaggagcgaggcctgggtggggaggtaccaggcagccaccagggtcccgatccctaccgccagctgcgagagaaggaccccaagtacagtgctctccgccagaatttcttccgctaccatgggctgtcctctctttgcaatctgggctgcgtcctgagcaatgggctctgtctcgctggccttgccctggaaataaggagcctctagcatgggccctgcatgctaataaatgcttcttc

SEQ ID NO: 246 - DNA, 557 bp, Homo sapiens
actcagagagaacccaccatggtgctgtctcctgccgacaagaccaacgtcaaggccgcctggggtaaggtcggcgcgcacgctggcgagtatggtgcggaggccctggagaggatgttcctgtccttccccaccaccaagacctacttcccgcacttcgacctgagccacggctctgcccaggttaagggccacggcaagaaggtggccgacgcgctgaccaacgccgtggcgcacgtggacgacatgcccaacgcgctgtccgccctgagcgacctgcacgcgcacaagcttcgggtggacccggtcaacttcaagctcctaagccactgcctgctggtgaccctggccgcccacctccccgccgagttcacccctgcggtgcacgcctccctggacaagttcctggcttctgtgagcaccgtgctgacctccaaataccgttaagctggagcctcggtagccgttcctcctgcccgctgggcctcccaacgggccctcctcccctccttgcaccggcccttcctggtctttgaataaagtctgagtgggcggct

SEQ ID NO: 247 - DNA, 526 bp, Homo sapiens
gcgcctctgggataggcgaccacggtgtcttcaaaagccccgtcagttggcttcctggggccggaccgactgtgggtcagtttgcaccagcgctctggaatcgagttacgcgcgaaagggcagagtttctggaggaaaccgcagcctctcaaccgctgaccgggtctcagaaggcccccggcaggccgcttggcgggaactgaccacgcgccagtcaggctctccagggacctgcgcaggcgcgtgtgggcggagtcgtgcgcagggggcggggcttcgggaaggagccacagagagggcggggcgtaggacctgcgcttcgggggtggagtcggagcggcgcggcggcggtcatgcgggacgcggatgcagacgcaggcggaggcgctgacggcggggatggccggggtggccacagctgccgcgggggcgtggacacagccgcagctccggccggtggagctcccccagcgcacgcgccaggtccgggcagagacgccgcgtctgcggccagggggtcacgaat

SEQ ID NO: 248 - DNA, 465 bp, Homo sapiens
ctgatagcgcggcggtgtggaccgcgcggccgaagagcgcggcgcccagagcgcgggccgctcgcggagccacagcccgagccgggtcccagccggagccgagccccagccgagccgagccgggcccggagcgcccggtgcccgcagccatgccggccggccgcgccgcgcgcacctgtgcgctgctcgccctctgcctcctgggcgccggggcccaggatttcgggccgacgcgcttcatctgcacctcggtgcccgtggacgccgacatgtgcgccgcgtccgtggccgccggcggcgccgaggagctccggagcagcgtgctgcagctccgcgagacggtgctgcagcagaaggagaccatcctgagccagaaggagaccatccgcgagctgaccgccaagctgggccgctgcgagagccagagcacgctggaccccggagccggcgaggcccgggcgggcg

SEQ ID NO: 249 - DNA, 577 bp, Homo sapiens
ggcgaacctagacaagaataagcagacgctggagaaagagaacgcagacctggccggggagctgcgggtcctgggccaggccaagcaggaggtggaacataagaagaagaagctggaggcgcaggtgcaggagctgcagtccaagtgcagcgatggggagcgggcccgggcggagctcaatgacaaagtccacaagctgcagaatgaagttgagagcgtcacagggatgcttaacgaggccgaggggaaggccattaagctggccaaggacgtggcgtccctcagttcccagctccaggacacccaggagctgcttcaagaagaaacccggcagaagctcaacgtgtctacgaagctgcgccagctggaggaggagcggaacagcctgcaagaccagctggacgaggagatggaggccaagcagaacctggagcgccacatctccactctcaacatccagctctccgactcgaagaagaagctgcaggactttgccagcaccgtggaagctctggaagaggggaagaagaggttccagaaggagatcgagaacctcacccagcagtacgaggagaag

SEQ ID NO: 250 - DNA, 560 bp, Homo sapiens
ggcggctgggctgtttggtttgagcgctcgccgtcttttggcggcagcggcgacgcgagggctcccggccgcccgcgtccgctgggaatctagcttctccaggactgtggtcgccccgtccgctgtggcgggaaagcggcccccagaaccgaccacaccgtggcaagaggacccagaacccgaggacgaaaacttgtatgagaagaacccagactcccatggttatgacaaggaccccgttttggacgtctggaacatgcgacttgtcttcttctttggcgtctccatcatcctggtccttggcagcacctttgtggcctatctgcctgactacaggatgaaagagtggtcccgccgcgaagctgagaggcttgtgaaataccgagaggccaatggccttcccatcatggaatccaactgcttcgaccccagcaagatccagctgccagaggatgagtgaccagttgctaagtggggctcaagaagcaccgccttccccaccccctgcctgccattctgacctcttctcagagcacctaattaaaggggctgaaagtctg

SEQ ID NO: 251 - DNA, 336 bp, Homo sapiens
ccgcgagcgaggtgagatgccggtggccgtgggtccctacggacagtcccagccaagctgcttcgaccgtgtcaaaatgggcttcgtgatgggttgcgccgtgggcatggcggccggggcgctcttcggcaccttttcctgtctcaggatcggaatgcggggtcgagagctgatgggcggcattgggaaaaccatgatgcagagtggcggcacctttggcacattcatggccattgggatgggcatccgatgctaaccatggttgccaactacatctgtcccttcccatcaatcccagcccatgtactaataaaagaaagtctttgagtagtcaag

SEQ ID NO: 252 - DNA, 678 bp, Homo sapiens
agacagtcgatcaccttcttatccgcgagtttcccggaacggagagttaagccagccagattgcctcggaaaaactgggtcatgtgcaggtcgccacctgcagaggccacagtcacaggctcagtttcattgtcattttcaactcctgaaaactcttgccagcaagcccccaccacgagctgagtttctatcttggatggatggagcgggtaatcctcagtcacagagaagggctcgtgggacgtgccatccacatagagagtcacactcgggaattctacattgaggacgtagtggtgccattcctcatcacagacctgattcaacttccagtggaactctgcaggtctgtatttcttctcctcagaaggatcctgacggaagaggaagatcagccggcacccgtggacatagagggagtagtggtgccgattcatatctgttttatcagaactgcaaagaattgtctccttcttcctgccgaatggcccatgtctcatccacaccgagatggtgaacggctctttggggctgaccgacacgacgccatccgggatcctcactgcctgggtgccgttgaactcaaacacctggtcgctgtcgtggccattgtcggtgggcaggcccatggtccagttgagggatccactcggggatggcagcagctcggcagtgccc

SEQ ID NO: 253 - DNA, 783 bp, Homo sapiens
gtacacctaggggctgggctaggcgagggggcttttggatgaaattgggacagtgctccctgggtaaagcccccgctttcctggaggtcagggggtcccagcccagacaggccctgcattttctgaactagtgttcagagaatctgagccaactgcagcctcagaaacaatgggcgggatagacttgctgccctgccagcacacctgctcaggttcccctgctccctgcagactggccggtgctgtcagtgggcaggtggtggggtgatggggtcctcctgtttccctggcctctggtggctgtcctgcagccttggaggagccagcaggactcatgttcagaggtcactcggccttgtgctgcagagcagtggcctgggcactttgtgagcattgtttgaacgggttttaggtaggctgagcacgtgaactggggaagatttgagtcaggagagcctgaggtcagggttggggctgggccgtgtctgtgctctctgcacagggatgccggcccctctccacagggtgggctgctgtccaaggcccagtaggcagcaggcaccctcctgagtcggcaagaatgggtgatttcacatctggaaagacccccaaacacttctattattttaaataaaaataacctttaaaattacagaagcaaagcaactgggtgtggtggcttatgcctgtaaccccagcactttgggaggccaaggcaggcggattgcttgagctcaagagttcgagaccagcctgggcaacatggggacaccctgtctctac

SEQ ID NO: 254 - DNA, 489 bp, Homo sapiens
gtgacagcctcgcttggacgcagagcccggcccgacgccgccatgagcgccgcgctcttcagcctggacggcccggcgcgcggcgcgccctggcctgcggagcctgcgcccttctacgaaccgggccgggcgggcaagccgggccgcggggccgagccaggggccctaggcgagccaggcgccgccgcccccgccatgtacgacgacgagagcgccatcgacttcagcgcctacatcgactccatggccgccgtgcccaccctggagctgtgccacgacgagctcttcgccgacctcttcaacagcaatcacaaggcgggcggcgcggggcccctggagcttcttcccggcggccccgcgcgccccttgggcccgggccctgccgctccccgcctgctcaagcgcgagcccgactggggcgacggcgacgcgcccggctcgctgttgcccgcgcaggtggccgcgtgcgcacagaccgtggtgagcttg

SEQ ID NO: 255 - DNA, 586 bp, Homo sapiens
gctgctcctgccgtgttgcgtagggcgcctgtgcttgaggttgggggttgcgtctctctctggtaaaggcgtgcaggtgttggccgcggcctctgagctgggatgagccgtgctcccggtggaagcaagggagcccagccggagccatggccagtacagtggtagcagttggactgaccattgctgctgcaggatttgcaggccgttacgttttgcaagccatgaagcatatggagcctcaagtaaaacaagtttttcaaagcctaccaaaatctgccttcagtggtggctattatagaggtgggtttgaacccaaaatgacaaaacgggaagcagcattaatactaggtgtaagccctactgccaataaagggaaaataagagatgctcatcgacgaattatgcttttaaatcatcctgacaaaggaggatctccttatatagcagccaaaatcaatgaagctaaagatttactagaaggtcaagctaaaaaatgaagtaaatgtatgatgaattttaagttcgtattagtttatgtatatgagtactaagtttttataataaaatgcctcagagctacaatttc

SEQ ID NO: 256 - DNA, 503 bp, Homo sapiens
gacagctggtgcgcctgcccgggaacatcctcctggactcaatcatggcttgtggtctggtcgccagcaacctgaatctcaaacctggagagtgccttcgagtgcgaggcgaggtggctcctgacgctaagagcttcgtgctgaacctgggcaaagacagcaacaacctgtgcctgcacttcaaccctcgcttcaacgcccacggcgacgccaacaccatcgtgtgcaacagcaaggacggcggggcctgggggaccgagcagcgggaggctgtctttcccttccagcctggaagtgttgcagaggtgtgcatcaccttcgaccaggccaacctgaccgtcaagctgccagatggatacgaattcaagttccccaaccgcctcaacctggaggccatcaactacatggcagctgacggtgacttcaagatcaaatgtgtggcctttgactgaaatcagccagcccatggcccccaataaaggcagctgcctctgctccctctg

SEQ ID NO: 257 - DNA, 667 bp, Homo sapiens
atcagagcatgaaggaagggaggctgacgcttgtgcttgctctggcaaccctgatagctgcctttgggtcatccttccagtatgggtacaacgtggctgctgtcaactccccagcactgctcatgcaacaattttacaatgagacttactatggtaggaccggtgaattcatggaagacttccccttgacgttgctgtggtctgtaaccgtgtccatgtttccatttggagggtttatcggatccctcctggtcggccccttggtgaataaatttggcagaaaaggggccttgctgttcaacaacatattttctatcgtgcctgcgatcttaatgggatgcagcagagtcgccacatcatttgagcttatcattatttccagacttttggtgggaatatgtgcaggtgtatcttccaacgtggtccccatgtacttaggggagctggcccctaaaaacctgcggggggctctcggggtggtgccccagctcttcatcactgttggcatccttgtggcccagatctttggtcttcggaatctccttgcaaacgtagatggctggccgatcctgctggggctgaccggggtcccgcggcgctgcagctccttctgctgcccttcttccccgagagccccaggtacctgctgattcagaagaaagacgaa

SEQ ID NO: 258 - DNA, 551 bp, Homo sapiens
gaaacacacctacccctggccttgccagagtggcttctgaggactccctgcccagcccagctttcactggggggagacgaggagaggcaatggtggtcttggcaacagaatgctcagcccctcgtggcaggacttgacaagggcaagcttgaccaggaagctgccatcagggatcttcccctgccccgcaaagctaggctccagctgcaggcgggctcccaccctctgctcctggccttgggcaagggcactcagcgcctcgcctgcccctgccttggccaatgcgaggtccttccttatccccaccatggggtccatggtctatttattctcgcccagctcaccctctacacagacactgtcctgggtgcacactcctcccttccctcgctgtgtacttccttgtcccctttttatttattgggcagggggagggggagggcacaggcaagaagagattcacagtgtcctggggtaagggggggttcacagtaatcatggtctactcctctttccgtggctgggggtagaattaataaagagagaaaaac

SEQ ID NO: 259 - DNA, 791 bp, Homo sapiens
ctcaggcgcctgctgcaagctcccgcctcggcctgcctcctgctgatgctcctggccctgcccctggcggcccccagctgccccatgctctgcacctgctactcatccccgcccaccgtgagctgccaggccaacaacttctcctctgtgccgctgtccctgccacccagcactcagcgactcttcctgcagaacaacctcatccgcacgctgcggccaggcacctttgggtccaacctgctcaccctgtggctcttctccaacaacctctccaccatctacccgggcactttccgccacttgcaagccctggaggagctggacctcggtgacaaccggcacctgcgctcgctggagcccgacaccttccagggcctggagcggtgcagtcgctgcatttgtaccgctgccagctcagcagcctgcccggcaacatcttccgaggcctggtcagcctgcagtacctctacctcaggagaacagcctgctccacctacaggatgacttgttcgcggacctggccaactgagccacctcttcctccacgggaaccgcctgcggctgctcacagagcacgtgtttcgcggcctgggcagcctggaccggctgctgctgcacgggaaccggctgcagggcgtgcaccgcgcggccttccgcggcctcagccgcctcaccatcctctacctgttcaacaacagcctggcctcgctgcccggcgaggcgctcgccgacctgccctcgctcgagttcctgcggctcaacgctaacccctgggcgtgcgactgccgcgc

SEQ ID NO: 260 - DNA, 431 bp, Homo sapiens
gttccctccatccatcatcctccatcatcctccatcacccatctcttctctctccacacagcgtttctggaccgcctgcctcagtgtccctctcgggggtggcctggggtcttggtgtctatgttggggggctgggagggcagtgactcttcatttgctgcgtcctgctcagtggcctgggtgggactgtggcctgaggtgtgactaaccgtggctttgtctctgtctgtctcccccaaaccccgtgctctgctgtgccttcccgcgcggcccctcacccgccgccgacccacagctccggaaaggcccaccagtccctccgcctcccaaacacaccccgtccaaggaagtcaagcaggagcagatcctcagcctgtttgaggacacgtttgtccctgagatcagcgtgaccaccccctcccaggtcagcc

SEQ ID NO: 261 - DNA, 467 bp, Homo sapiens
  misc_feature 438: n = a,t,g, or c
aaaaaactccagtcctacacaaagctcttagattcgggagtgggtacctgtatgaatccgttctcacactgctataaataaacacctgagactgggtaatttataaagaaaagaggttttgttgtctcactgttccacaagctgtacaggaaatgtgatgctggcgtctgcttggcttccgggggggtgcctcgggaaacttaccatcatggcagaaggcagagggggagccggcacttcacatggctggcggtggtggtgggggcggatgggggggcttgccgcacacttttaagtgaccggatctcatgagaccaacaccaagagggagctctgcccccctgatcccgtcacctccccccaggccccaccgccggcattggggatgacaattcaacatggggcctgggtggagacccggatccgggcggagacacngatccaaattttgcatttttcccctaatt

SEQ ID NO: 262 - DNA, 250 bp, Homo sapiens
acctgaagagcgctcctctgccttggacaccatcccctcctagcacaaggagtgcccgccttgagtgacatgcggctgcccacgctcctgccctcgtctccctggccacccttggcctgtccacctgtgctgctgcaccaacctcactgccctccctcggccccacccaccctctggtccttctgaccccacttatgctgctgtgaattttttttttaaatgattccaaataaaacttgagcccactcct

SEQ ID NO: 263 - DNA, 508 bp, Homo sapiens
ttcaccgccggtcccttgcagcgctgcctttcgatctctccacatctcggtggcgcgggatctcaagatgcgcctccacctgctcctgctgctcgcgctgtgcggtgcaggcaccaccgccgcggagctcagttacagcttgcgtggcaactggagcatctgcaatgggaacggctcgctggagctgcccggggcggtccctggctgcgtgcacagcgccttgttccagcagggcctgatccagagtctcactctgtcgcccaggttggagtgaagtggcatcatcttcctcactgcattctctgcctcccaggttcaagcgattctcatggtctcaccgtgttgctcaagctggtctcgatctcctgagctcaggcaatccgcccacctcggcctgtcaaagtgctgggattacaggtgtgagccaccatgggtggcctctttaatatagatttataaggcccctttgttatatattttcaaaaattcaaattaaaactaaatcccc

SEQ ID NO: 264 - DNA, 489 bp, Homo sapiens
acgtttgggggccttctttcagcaggggacagcccgattggggacaatggcgtctcttggccacatcttggttttctgtgtgggtctcctcaccatggccaaggcagaaagtccaaaggaacacgacccgttcacttacgactaccagtccctgcagatcggaggcctcgtcatcgccgggatcctcttcatcctgggcatcctcatcgtgctgagcagaagatgccggtgcaagttcaaccagcagcagaggactggggaacccgatgaagaggagggaactttccgcagctccatccgccgtctgtccacccgcaggcggtagaaacacctggagcgatggaatccggccaggactcccctggcacctgacatctcccacgctccacctgcgcgcccaccgccccctccgccgccccttccccagccctgcccccgcagactccccctgccgccaagacttccaattaaacgtgcgttcctctcgac

SEQ ID NO: 265 - DNA, 684 bp, Homo sapiens
acctctgctgcagcccgtgccgccgccgcctcctgggaagagaggaagcgggagaggagcccacgtcgcctgtcacccaatatctccagccgcgcagtcccgaagagtgtaagatgttcgcctgcgccaagctcgcctgcaccccctctctgatccgagctggatccagagttgcatacagaccaatttctgcatcagtgttatctcgaccagaggctagtaggactggagagggctctacggtatttaatggggcccagaatggtgtgtctcagctaatccaaagggagtttcagaccagtgcaatcagcagagacattgatactgctgccaaatttattggtgcaggtgctgcaacagtaggagtggctggttctggtgctggtattggaacagtctttggcagccttatcattggttatgccagaaacccttcgctgaagcagcagctgttctcatatgctatcctgggatttgccttgtctgaagctatgggtctcttttgtttgatggttgctttcttgattttgtttgccatgtaacaaattactgcttgacatgttggcattcatattaattacggatgtaattctgtgtatcttactgtgactccgaaaactgtagtattggtgtcatgggaatgtacgttatttccaaagtcatttcattaaagatgaaaacttt

SEQ ID NO: 266 - DNA, 548 bp, Homo sapiens
cttgtcctgagcgcggagagggcgagctcgggccgcgggcagggcgggagccggcagccggcaaccaagggaggcagaaaggcacaaagatcgcaataatatccgttataacccgctatctaaccccacccccaacacacacccatccatcccaccctccgggagaggcagccggcgatccgctctctgcgccctgggaaaaagccccagccatgagcaatcagtaccaggaggagggctgctccgagaggcccgagtgcaaaagtaaatctccaactttgctctcctcctactgcatcgacagcatcctgggccggaggagcccgtgcaaaatgcggttgctgggagccgcgcagagcttgcctgctccgctgaccagccgcgccgacccggaaaaggccgtgcaaggctcccctaagagcagcagcgccccgttcgaggccgagctgcacctgccgcccaagctgcggcgcctgtacggcccgggcgggggccgcctccttcagggtgcggcagcggcggcggcggcggcggcggcggcggcggca

SEQ ID NO: 267 - DNA, 736 bp, Homo sapiens
cgcccgtgtcctcctcacccgctcctgcgccatcctgcccaccgtgctcgtggctgtcttccgggacctgagggacttgtcgggcctcaatgatctgctcaacgtgctgcagagcctgctgctcccgttcgccgtgctgcccatcctcacgttcaccagcatgcccaccctcatgcaggagtttgccaatggcctgctgaacaaggtcgtcacctcttccatcatggtgctagtctgcgccatcaacctctacttcgtggtcagctatctgcccagcctgccccaccctgcctacttcggccttgcagccttgctggccgcagcctacctgggcctcagcacctacctggtctggacctgttgccttgcccacggagccacctttctggcccacagctcccaccaccacttcctgtatgggctccttgaagaggaccagaaaggggagacctctggctaggcccacaccagggcctggctgggagtggcatgtatgacgtgactggcctgctggatgtggagggggcgcgtgcaggcagcaggatggagtgggacagttcctgagaccagccaacctgggggctttagggacctgctgtttcctagcgcagcaatgtgattaccctctgggtctcagtgtcctcatctgtaaaatggagacaccaccacccttgccatggaggttaagcactttaacacagtgtctggcacttgggacaaaaacaaacaaacaaac

SEQ ID NO: 268 - DNA, 418 bp, Homo sapiens
  misc_feature 379,380: n = a,t,g, or c
gccgccgccgctaaacagacgctttcctttttaattttttttccatgtgttcacttccgggtccggcgtcgatccggatgcccgaggcagaaggatgtttgacctccggataagcgaggcgctgctgtgcattcattccgggctgcatcggtggcgacagcagaggctcgggcggcgactctccggccagcggcggcggtaggaggcaccagcggcagtgcatggaccgaatccgagcagcgctgcgttacctctctctctcgctccttcccccctacctcgctcgctcgctcgctcgctccctgcgtggctcgctttcctcctccggccgccggcgggtgtgatgtgccgccgccgctgcccccgccggcgctgtcgnnctgggcgccgcccgcgcccgggaccgacccctctgctc

SEQ ID NO: 269 - DNA, 409 bp, Homo sapiens
tgcagcgtgtgggtcattttgaccccgtgacccggagccccctgacccaggaacagctcatccccaacttggctatgaaggaggttattgacgcattcatctctgagaatggctgggtggaggactactgaggttccctgccctacctggcgtcctggtccaggggagccctgggcagaagcccccggcccctatacatagtttatgttcctggccaccccgaccgcttcccccaagttctgctgttggactctggactgtttcccctctcagcatcgcttttgctgggccgtgatcgtccccctttgtgggctggaaaagcaggtgagggtgggctgggctgaggccattgccgccactatctgtgtaataaaatccgtgagcacgaggtgggacgtgctggtgtgcg

SEQ ID NO: 270 - DNA, 598 bp, Homo sapiens
ggttcctaccaggggtagccaggatctgggaaacagatcagcgactctagtctgaagtggctgcctggttcgggggctgccttcagcaagattcaggcaggagagacggaaatagccaccttccaggcgtgagtcctggagataaaaatggattttaacctaggactgccgggagctggccctccgcggctgctcagactagggctgtgtgtgctggctctcgcctgtttccggtgtctaactggcttgtttctctttatggcttggcttcattccgacctggggtggggccacatccaacccactgcccactggctgtccgtctggcctgccccgcggttccaaccacagtggtgaagcagcgcttgcagatgtacaactcgcagcaccggtcagcaatcagctgcatccggacggtgtggaggaccgaggggttgggggccttctaccggagctacaccacgcagctgaccatgaacatccccttccagtccatccacttcatcacctatgagttctgcaggagcaggtcaacccccaccggacctacaacccgcagtcccacatcatctcaggcgggctggccggggccctcgcc

SEQ ID NO: 271 - DNA, 430 bp, Homo sapiens
  misc_feature 393,394: n = a,t,g, or c
aaccccgccccgagcctgccacgggccagcggcaggagctcgcagtgattccccgccatgatcccagcaagccccaccacacctccgcttcaccggaagagtccggcttttaatatcgccctttgcgttctgtcccgcccactggtcagcccttgtagaacacccgccggtcacatggcaggcggaagttccatccgggaaaagcagaccggctggtcccacttccggagggagtgaaaccgagcttggggcgccaacgctagcgggcaatggcagacacccgcccccaaccgcgccccctccgtggcggggtcaaaggaagagccacgccagcaaacctctacactctacatgctttttattacaagactactgaccatacgaggaaaattnntcttctggtaactacacctaaagcacaagtatttgg

SEQ ID NO: 272 - DNA, 456 bp, Homo sapiens
tttttttttttttttttttttttttttttcaagttaagttaaatgtcaaagggaaggaagctgcaagagaaaagaagttttatctccccaagtctctctgtccttcctttgagctcaccaatttctcctcttcaaacagcttcttgttttcaggggatgcatatacagccagtccctgaggaaggagtcgattccggcctaaagatttcttcactgagaccaggtcaccccggactccaacattctccaccgactgcgtcaggatgagctccaggttttctttgggccgatgcttcgtgtcctccaccagcttatagacgcgatgtcgccggtgcaggcgcggcttccggccctccccggccagcggtaccttccaccagcgctccacgatgaccgtgccccgattttgagaaaggctgaagttgcaggccaggtcaggggcgttcccttcatgtc

SEQ ID NO: 273 - DNA, 500 bp, Homo sapiens
cttagcttatattaatagaataaaattagtagtcatcagtattacttttctgttaggcatactgttagatgcctcacaaaaaccccattagattttacagatgaaactgaggctcaaaaggatgaaacaatttgatttgcctaaggacacaacttataaattcaaagtcttcaaaccgtggcatttgtctctcaataaaaggaagcatttgctgggtgcggtggctcacgcctgtaatcccagcactttgggattacaggtgggcagatcacttgaggtcgggagttcagggccggtctggccagcatggtgaaaaccctatctctgctggaaaatgcaaaaattagctgggcatggttggcacacactgtggtcccagctgctcgggaggctgaggcacagaatcgcttgaacctcggaggtggagtttgcggtgagccgagattgcaccactgcactccagcctggtgacagagtgagccctgtctcaaagaaaaaag

SEQ ID NO: 274 - DNA, 762 bp, Homo sapiens
ggaaaaacacgccagaaatatccttttggatgttgcttggaagaccgaccctgagggaggtcagctcatggggactgaggtcagggccaggctgccttgctcagctccaggaaggggcaaccctgcacaggccaggtccctgcagcttctgatgacggcagcttctcagagagggctggctgcagagaccacagaccttcagggtggcagacaccaaaaaggctgtggagcccaggcctttcaacttgccaaagatcctgctcctttccttaaggacttaagcactcctttttttctttttccaaaaggggtcttgccgtgttgcccaggctggagtgcaatggcgtgatcatagctcactgcagcctcaaactcctgggttcacgcaatcctctcgtctcagcctcccgagtagctgggactacaggtgtgcaccactatgcctggctaatttattttatgatttttagagatggggtattgctcattgcccaagctggcctcaagcaatcctccctcctctgtaaccccaaagtgctggaattacaggggagagccactgcacctggccgactcaagctttgtagaacctcatagtcacttgaaagttactttcctttgagagacctcctgggggtcaggagggatcttcacctatattcaaagccctccaggtcctttctttgcctttacaggaacacagggcccactcccctgggggttgcataatcaatagttatctccttttctgagcatgaaagc

SEQ ID NO: 275 - DNA, 724 bp, Homo sapiens
cgaagggtggacttgggtgtgaaggatgggccttggttttctgcaggtgtctaccccgtggtgggccacgcccactgtgcccccagctccccagcccatagtactgagcacagccgggaggcatgggaggggctggagtccccttggtccccctggaggaggtgggcctgggcaggttcctggcagagggaccgcacaggctctcagggcaagtggtcaagcagccctggccgcggtggttctactggtacagcctctgggccacagcctgattgtgagggtgctggggagccaaggagggctctgggaagtaggcatcctgcttagactcgcatcgggaagagcaggccgtggcttcagggatgcaggactggagatgctgctgactaggggtcagggtgtccgtctctgagggcctgatggggggctggactgacagcaaagttcacccaccctgtggcagggcccgtggctccctgtctctgattctggaggtgagccaggcctcttacctgccgctgcaaaggacaaggcccagggaggcagtcagcttggggcgtgatggagtgaagttggaacgtgccctggggtgggggaggcgttgcccagcctggctggcagattcctctcagcccgggccaagggccgggcctgtctccttcacaagccggcggaaaccggggctggaaaccccagacccgccacttccctcagaggcgcagcc

SEQ ID NO: 276 - DNA, 509 bp, Homo sapiens
  misc_feature 391,392,418,470,471: n = a,t,g, or c
gtcgccatggcctccgtcgcccaggagagcgcgggctcgcagcgccggctaccgccgcgtcacggggcgctgcgcgggctgctactgctctgcctgtggctgccaagcggccgtgcggccttgccgcccgcggcgccgctgtccgaactgcacgcgcagctgtcgggcgtggagcagctgctggaggagttccgccggcaactgcagcaggagcggcctcaggaggagctggagctggagctgcgcgcgggcggcggcccccatgaggactgcccgggccggggcagcggcggctacagcgcaatgcctgacgccatcatccgcaccaaggactccctggcggcgggtgcctgcttctgcgggcgccggcggccgtgcggcgctggcggcnngtgcgtggcggcctgctgctccgcgncgcgctgctccgtggccgtggtgagcgctgcccgcgcgccccgcgcccccannagccgtgctcggctgctacctcttcacctgcacggcgc

SEQ ID NO: 277 - DNA, 786 bp, Homo sapiens
gcagaacttaccctcttgcccaagagaataggagtgctattttttgggtgcagagagtgagggtagtggatagaggtctgaaagtgtagacagagtttgccataagagcagcgttagattttgtccaggtttatctcatttttctctgttggagaccaagatgcttgacgtgaagtgtgtatttgtgtaatgtgtattggttcatttcagttttttataacttcaaactatgccatcaacctaatcaattttaattttgattgcatatcaatagcaaccataaattttttcaacccccaaatttatgtagctctgatttgtagaatattgttttttgcagacctttcacatatgtgctttatgttgattctctctaattctgtaagtttctggagaaactgaggctaggcacacagtttgttacacttggtaaatgccagacccaggatgtgaacctagatagttcaactccagtgcctggatgtctgagttaagagtaataaaggtggccgggtgctgtggctgatgcctgcaatcccccagcactttgggaagctgaggcgggcagatcgtgaggtcggagttcgagaccagcctggccaacatagtgaaacccagtctctactaaaaatacaaaaattagcctggcatgatggcgcatgcctgtagtcccagctacttgggaggctgaggcaggagaattgcttgaaccagggaggcggaggttgcagtgagccgagatccaccactcgtactccagcttgggcgacagagcaagctcgtccc

SEQ ID NO: 278 - DNA, 512 bp, Homo sapiens
ggcccggagcgccggagccggaggcggagacgtggttggcggggactgtgcgccctgggaggggtcggagtcggcgggggcggagcctcagcgctccctgtcgcctgcggactccatggcccttcctggactggcccttgcccaactcccagccaccaccactgtccctaccactgagcccttgcacaggccacttgctcagacgagacaccctaactcttgctcactccctaaagccctcttcaggggtcacctcctccaagaagccctccttgccaccccccgccggcaggggcccctcctctgtgctccctcggtcacctgtgctacctctaacaccacactgaccacactgtatcgtgagtgtccgttgacgtgaccaattgccctgccaggctgtcagcgcctcaagggtagggtctgcgtgtgatttgtctctgagccccctgtgcccacccagggcccggcacagagtcgatgctcaataaatgtgtgttgactgcaaaaaaaag

SEQ ID NO: 279 - DNA, 773 bp, Homo sapiens
  misc_feature 552: n = a,t,g, or c
gtgcgatctcggctcactgtaacctcaacttcttggtttcagatgatcctcctgcctcagcctcctgagtagctgggactacaggaccgagtctcctgccattccgagcaggcctggtatgggtaatggtgtgaaggaaggcccggtgcgattgcatgaggatgctgaggctgtcctgtcctcgtccgtctcatcaaagcgtgaccacaggcaagtgctcagctccctgctgtctggggccctggctggtgcccttgccaaaacagcggtagctcccctggaccgaaccaaaatcatcttccaagtgtcttcaaaaagattttctgccaaggaggccttccgggtcctctactacacctacctcaacgagggatttctcagcttgtggcgcgggaactcggccaccatggtgcgcgtggtgccctacgccgccatccagttcagcgcacacgaggagtacaagcgcatcctgggcagctactatggcttccgtggagaagccctgcccccttggcctcgcctcttcgccggcgcactggctggaacgacagncgcttcactgacctaccccctggacctggtcagagcgcggatggccgtaaccccgaaggaaatgtacagcaacatctttcatgtcttcatccgcatctcgagagaagaggggctgaagactctctaccatggatttatgcccaccgtgctgggggtcattccctacgctggcctgagcttcttcacctatgagacgctcaagagcttgcacagagagtaca

SEQ ID NO: 280 - DNA, 805 bp, Homo sapiens
tgaatttgtacactgaaagaaaatttaaataaaggggaagtccacattaaaaagaaaacaaaacaaaccctaactaacttccaaatgggtctcctggtgcgggggcgtgagtggccgtgccctgggtgtgctgcctgtctgagcaagcttccctagctgtggaaccccgggccccctgctgcgggctctgccttggtgtcatgcctgctgcacccccgtttccactgacgtgccgtctgtggctatgggggtggtcactggaatgacggtcactccagacgtcagccggcagggatgcagcaggctggccgcgcaccggggctcgggcaccctctggccccacactggcaatgatgccacaccttgccatgtccacgctgttggtcaaacccctctgtcatgcctttttaaagagaaaagaagagaaagatttttttttttttaatggcagaccgaagtggagatcttgtagcctagataggatagtctgaccttctagcatagtctttttggcaaatgatttgtgttttcagtgtgtggggaagctgtcctgggggctggggcgacagatagcacataggctgtttctggggctgcaggggcttccctgagctggatgttgtgggtgttgccgtgcttcaggaagtgtggcgaccagaaagcgtagacccggggcccagggtctgcccgcccctgcagcctggcctccccgcacaggctgtggcttgcactccagccgctctagtctctcaggaatttgcttgttacttgtactgtgtaaataaagcttcctggttcaataccc

SEQ ID NO: 281 - DNA, 872 bp, Homo sapiens
ctgggatgttatacattctgggaactggacaggagtggctgcttgggtgggctctggcaccctgggatgttatacattctgggaactgcaatcagccactagagaagtcggagctacaggaagtgaccctggggtgggacctggggacatggccaggtcagcatggggacacccggctccagcaggagctctggtctgtcctggggtctttgggggcagggctgcggccctgggcaggcttcctccaggcggaggtcctggggaagtgggggagccaggccagctgccgcctcccccactatgtagcatctgattcgtcatctctcatgaaggcgatttggttcataactctgaaactctgaaaaaggtcaaaagaagcagagaggccctcggtggatatgccagcttttctgccggtgctttctcccactactctgggtggtctgctctcctcttcaaacctcagctcgcagggagggcctgaatctgccagcccctcaggatctccttccctctgggccctccccagccttaaggagcctcccagacagaagggtggacagagccacctgggcagcccgagagacacacgggggtcctccctgtggacagccctgccagcttccgcccagccctgagcttcatttgcatcttgaggagtaaggggtggtgaaatgggaatgctggtctggctcagctggtcgtgggcataagtgcccgctgaatggatggcatctctccctcctgtcttatgttctggggtccaggtgcttcccagggccatgcccctgctgctaatgcttgccctaacccttaccctaaccagcgtccagcgtcgtctcaccgagccgtaaataaatcaacagattcac

SEQ ID NO: 282 - DNA, 486 bp, Homo sapiens
tttaatacttttttttttaatgtggggaaggagcttgctctgacgtcaccctcctctcccctgactcctgtcctgagagctgtggatgccgcctcctgccctgcctacccctgaaacgtggggaatgggggccccaggacagcatcaggacttttgagtccagctgccagcaatggttccaactcggaggcagcgcctcttggtccccatttctgtatagcaggcgtgtgtgtgtgtgtcgaggttttttattttttgcttaatcaaactccattcccaaatgcactccatctctggctctgagggcgctccctcctctcagccgggcagcctggcctctcctgcccagacctgcggtcccagcatcccccagagccagggaacaggcccagcgggagggggttttatgttttgtttcaaacagaaaacacaaccttatttttctttacaaaagcaaaaaaggaaaccaaaaaagatacagccttc

SEQ ID NO: 283 - DNA, 515 bp, Homo sapiens
tggaaattatataaaactgaaatgtaatgtctaatgataaagtttgcatgaaacatggccatgctcattcatgtatatattgcctatggcttcttttgcattataatggtagtgttgagtagttgtaacagaaactgtctggcccacaaagcctgcaatacttaccatctgacccttcacagagtaagttctctggcccatactatggagggtcaagaatagaaacagtggggccaggcgcagtggctcacgcctgtagtcccagcactttgggacgccgaggcaggcagatcacctgaggtcaggagttcaagaccaggctggtcaacatggcgaaaccccgtctctactaaaaatacaaaataattagccaggtgtggtgactcatggctgtagtcccagcttcttgggaagctgagacacaagaatcacttgaactcaggaggaggaggttgcagtgagccaacatcgtgccgctgcactccagcctgggtgacagagtgagactccatctc

SEQ ID NO: 284 - DNA, 629 bp, Homo sapiens
  misc_feature 454,548,553,594: n = a,t,g, or c
ctcatggtgggttcaggggactcagccctgaggtgaaagggagctatcaggaacagctatgggagccccagggtcttccctacctcaggcaggaagggcaggaaggagagcctgctgcatggggtggggtagggctgactagaagggccagtcctgcctggccaggcagatctgtgccccatgcctgtccagcctgggcagccaggctgccaaggccagagtggcctggccaggagctcttcaggcctccctctctcttctgctccacccttggcctgtctcatccccaggggtcccagccaccccggggctctctgctgtacatatttgagactagtttttattccttgtgaagatgatatactatttttgttaagcgtgtctgtatttatgtgtgaggagctgctggcttgcagtgcgcgtgcacgtggagagctggtgcccggagattggnacggcctgatgctcccgcccctggcccggggtccaggggaagctggccgagggtcctgggctcctgagggcatctgccccccccccaacccccnccccncacttgttccagctctttgaaatagtctgtgtgaaggtganagtgcagttcagtaataaactgtgtttactcagtg

SEQ ID NO: 285 - DNA, 409 bp, Homo sapiens
ctgcgcgcgcctgcgcgctcggtgacctttccgagttggctgcagatttgtggtgcgttctgagccgtctgtcctgcgccaagatgcttcaaagtattattaaaaacatatggatccccatgaagccctactacaccaaagtttaccaggagatttggataggaatggggctgatgggcttcatcgtttataaaatccgggctgctgataaaagaagtaaggctttgaaagcttcagcgcctgctcctggtcatcactaaccagatttacttggagtacatgtgaaagaaaacgtcagtctgcctgtaaatttcagcaagccgtgttagatggggagcgtggaacgtcactgtacacttgtataagtaccgtttacttcatggcatgaataaatggatctgtgagatgc

SEQ ID NO: 286 - DNA, 380 bp, Homo sapiens
ccccatcacccgagaggagaggacgccccaactaacccccgctggccctcgggcctcccgagtggccggctgcaaccacggctcctctccagggtaggccagcttgaggaatcttatttattttatttatttacccaaatttgaactagtctgttgggttgggggaaggaggtggctgctacccccaagccttcccagtgctgacaaccccgggggcaggcgagggcgcccagtccctcaccatcggctgcacatcgcgccctcgggccctgccatgtccctggtgctactgacctctcaaggcttcctccaatctggggtcgggggaccctgggaggtgctttacagaccgctaataaaagacgatctgcgtgaacgcc

SEQ ID NO: 287 - DNA, 690 bp, Homo sapiens
ctttttctaagttggtagacctaaaaaatgttttcaaaaatatatctagctgcatttctactgctgtcattccttaaagctcttcctccaaaaactccatatgaatgaatacatttaccaactcagtgattactaaataatagtactttatacttatacacagtaatacctttcatctaaggatctcaaatgccaatatattagtcatcaccctgtaaggtggatgacatattattcccattattccaatgggaaaattgggccatagaaaactgaggagcaaatgactcatctacaggaattaaatggaaaaaacaggctaggatttctcagcacactttaggagtgaatgaaaacttacaggcttcagttctactgctggccaccattggatttgtaagatccaggatgtgtattgaccacatgtgtccagacccaggcttagggcatctggaatgagagtggtgggctggtgtgtgggtctgaggatctggatgggagactgcattttcttctctgtgcaaaatatggaagtgtgaccttgaaggtgggcttagtctatggccttccccactcctgcttgaactgaagctggagagaatgggcatttttaaatgttacggcatatgctaatataatattatggcattaaataaaaacaagaagagaactgactaaaaccaaaaaacc

SEQ ID NO: 288 - DNA, 400 bp, Homo sapiens
agaaactgtagcatatccagccccctaaaatgtacaatgtaacttgttcagtccaacaaaaacaggttccttatgtttctgccttctccaccagggtcgctccatcacccaaacaaaagaacaaggtttgccaggatgtccgagtgccccctggccctggctctcgtgtgcatggacgtgcctgaggggtccgggcacggccatacgcaggacccctgtgcccggggaggcgctgcagggattccccatccggtcgtcttggggccagcccgtcttatggactctgccttgctttgcttatgtttagctgtttctctgctacctttcgagcagacttctttactacactgcactggattgctatatttttaaccagaaataaactaaagattagagcatg

SEQ ID NO: 289 - DNA, 490 bp, Homo sapiens
gccctgccccccagcactggcagcacgctgggccctccccacacaggacaccgtgcagttccgggggaagctgactcaaatcaaccttgaaatctcatgaaaacaaaatgacttgtctttttatttgatagtgtaatatcattcattttataaattttttagggtttttctcgtaatattgtacagttttgcatggcctggtgtgatcattttttggttagaatataatgctgacaaatgtggatggaggggaagatactgctttagcctatcactccttattttattttgtttggttttatgccctcagtgtcttagggaactttttaagagatcctctgctaccaaacaatgatgtggattcttttgcacagaaatatttaaggtgggatggtaaaaaatgtcacaaaagactcctcaccaatactttatgttgatatcacttaatattaaccagactttgctgtattgcaataaaacagagaactgt

SEQ ID NO: 290 - DNA, 497 bp, Homo sapiens
ctggggggcccagtgtgaaggggaagcctgggaagaggctctcagctcctcgaggccccttcccgcggctggctgactgcgcccatttccactacgagaacgttgactttggccacattcagctcctgctgtctccagaccgtgaagggcccagcctctctggagagaatgagctggtgttcggggtgcaggtgacctgtcagggccgttcctggccggttctccggagttacgatgactttcgttccctggatgcccacctccaccggtgcatatttgaccggaggttctcctgccttccggagcttcccccgccccccgagggtgccagggctgcccagatgctggtgccactgctgctgcagtacctggagacactgtcaggactggtggacagtaacctcaactgcgggcctgtgctcacctggatggagctggacaatcacggccggcgactgctcctcagtgaggaggcgtcactcaatatccctgcagtg

SEQ ID NO: 291 - DNA, 713 bp, Homo sapiens
gcagcttcaggtgagccaaggggtctgctcctgtggcggtgcagtggcaaaggatccagatagcctagggtgagggtgacagagggacagtgggctatgccactaggccctggtctggctttggaaagacctgtgaggggaaaccttcacccagcacccatgccccactctgctgaggccagaggaagggaggcctgaggggcagattggttcatgcctggggtggaggctaagcctggacacagtcagggcggggctggccagctgtgcgagaacacaagccacgcctgcgatggtgctgcacccctggtgtccctgcctggccctcctctggtcacttcaaacatgccctcaggcttggggatgcccttcttccattcccagacagcagtgtgagggtgcagggaccaagatgtcaagctggccgtggagtcgagttggccgacggacccctttcacctggttatgagccgacttctttggggttctgcctctggcctgggaaaagggcaggagcctagaggaggaaaaaggctggtggacagacccagggtggtcttcaagcctggcccagtgagagtgaggcccccgcacgcaagcctcagccactcccaggggcctttgcagcgtctttttaacctcagaaaatttctcaatctatgtgatttgtgtaatactaatgagctttgggcaataaatacgggatttaaagc

SEQ ID NO: 292 - DNA, 510 bp, Homo sapiens
ggatgaactgcgtctggactcttagattcataaaatattcgagggtttgggagtcacagaccctcccctctcctcagtgcactttagcatttgcacggtgtcttccccggacagcacagcaataaatggtgtgattgcgtggacaccgtggctctgttcttggccaagtttccccaccttctgcccaggactccactgctaattcgggcccatcttcctccccaaggaagacaaattctttttctagcgctgcagcagggaggtggggtgggcggtaaacagacaggctctggcagtgcagatctgctgatcctcagcgcctgccaggagccagactcttggcggagcagtgccacttctgctgggctgacctgcagcggagagtctgcccaccccggagacaccatgagggaatggaccacgtgggagcatctgtgtgcaagtctcatttgggtgtgtttatgctgcgtgttgtatgcctgttttagtcataaagtaggcctgatatct

SEQ ID NO: 293 - DNA, 559 bp, Homo sapiens
ggggcggccagcctggacacacgttagaactggctggggagggtctgtaggggaggccggactcagggctcaccctggagaggaggacaaagggtgctgaatctggactgaatccgacctctagccctgggctgggccgtgggagtgctggccaacgtgccaggcagggaggacctgaattcctgaaggtggtggtggcagctgttagggtccacaggttaatgatctccaacgtcacacagaagagaatgtgctgaggtgtgacctccctcaccctgccttggctgcgtggggcaccgtctctccaggactcaccctgccccccaatagactgaagtctgaagatcagcccagtcttccttcaggcctcaatgccctctcacttccccagcccgagggactcctggctcttctcggaggctgctctgtggggtccctcccttgggcctttgctaatgctgtgccctctgcctgtgccagaggtgggcctgggcccgtttctcagggagctcctgaacaccaagaaattgaattgctttgtaaataaacaaaaagtgcc

SEQ ID NO: 294 - DNA, 444 bp, Homo sapiens
ctccgtgccatcatgtccgtcctgacgccgctgctgctgcggggcttgacaggctcggcccggcggctcccagtgccgcgcgccaagatccattcgttgccgccggaggggaagcttgggatcatggaattggccgttgggcttacctcctgcttcgtgaccttcctcctgccagcgggctggatcctgtcagacctggagacctacaggaggccagagtgaaggggtccgttctgtccctcacactgtgacctgaccagccccaccggcccatcctggtcatgttactgcatttgtggccggcctcccctggatcatgtcattcaattccagtcacctcttctgcaatcatgacctcttgatgtctccatggtgacctccttgggggtcactgaccctgcttggtggggtcccccttgtaacaataaaatctatttaaacttg

SEQ ID NO: 295 - DNA, 889 bp, Homo sapiens
gcggcggcggcggcgcccgcgggcaggaataactcaagtcacctgtactggaaatcagtttgctgaaattaatcaacgattcttgaagttgaagaaaaggaggttccagccttggcaagaggagtgtggcccttcctggaatccctctggacacaccctcctagcatcctctaggaaagatgcggcagctcaaagggaagcccaagaaggagacctccaaggacaagaaggagcggaagcaagccatgcaggaggcccggcagcagatcactacagtggtactgcccacgctggccgtggtcgtgctcttgatcgtggtgtttgtgtacgtggccacgcgccccaccatcaccgagtgagccccgcagccggccgcggaccccatcggcagggagaggaggcgcgggagggggacgcaaacaaaaaatggctttcatattcagagatgttcatgttgctgagctgtaagcaggagcaccctgtcttctctggtctttgacttgattaaagtatctccgctttcttgggagggaataggggatgttttatcagtgaatgtgccatacaccttatggtccacttcatgtgccctttcagacttcaaagcgcgcgcgcatgtgtgtgtgtgtgtgtgtgtgtgtgtgtgcttctttttctctcctaaaaatcgataagtagctccacctgaagagggatggaacatctgggtaaggaaacagatggaataaaaaatcacctaattccctttgtttgaataatacctatttccaaaaagtgttaacaatctcaaaagaggaactgtatttacttatatgtgattaatgtgatttgaaatatgttaaatcaaagtgaaatattatattttttgaataaaggagataatagccct

SEQ ID NO: 296 - DNA, 687 bp, Homo sapiens
aatccccaggagacctttgctcacatcttctgtcaccttatcctggctcttgcctcatttttcttttctagagtcatcctagggaatttcttgccctcactgaccttcctccatttctttccccaccttgatgagtttcagtaggtcttttttgctttctctcgtcctaagccatttgtctctaacaagtccccatctgaaagttttattgtgaatgagtgaatgaaaccttagagagtgttgcgagttacattcatgttgcccttggatataaaaagagaggcagatgcatttgcttttggggtcttagtcgtgaatcctttgcctaggccaatgtccagaaaagtttttcctggttatactgtagaaatgtcatggtttcgggtcttagatttaagtcattgttctattttgagttgatttttgtataaggtaagagagatggattcagtttcattcttctacatgtgggctatctacttttcccagcaccatttattaagtaggatgttgtttccccagtttatatttttgtgtgcttagttaacgatcagttggttgtaaatagttggctgtatttctgggttctctattctgttccattggtctatgtgtctacttttataccagtaccacgggtacactaaaatctcagacttcaccactatacaattcatccatgtaacc

SEQ ID NO: 297 - DNA, 596 bp, Homo sapiens
tttggggatcagcatgcaggaagctctggtgatgacaccccaggggcgtgtgtgaaacggattcaggctgccaagcgttattcactgtggagagattgtcatcaccagagccgtgtctaaaggatttagccagggctggatacggaaaacagaatggaagggggctttgggagaccagcccacctcacaagaaagagctgagagcctagatttgggccagcgggggtagtctctggacggagggcggcacggggctggaggaggagcgttttatgatgcggccgtgggtgctggccttggctggggcttgtggcgactgggtgccgtgacgtgggggtggaccgggtagagcggggtcggcagggggccgagtccgggcgccccccgcatcctgacctgtctcccacacagggttcgtgggcccccaagaaggagccgtacgcccgggagatgctggcgatctccttcatctcggccgtcaaccgcaagcgcaagaagcggcgggaggcgcgggggctgggcagcagcaccgacgacgactcggagcaggaggcgcacaagcctggggcgggggccacagcgccggggactcagga

SEQ ID NO: 298 - DNA, 694 bp, Homo sapiens
agaaaactgcagcaccccagcatgtgagttactcaggtgttgggggctagaagggacagtgcgtttaaacaacactcagagctctggccttaaacctgtggccccccaagtctaggagcctcatctcttcctggcagtcatgcgggcaggaggtcctgaaaggaaaacccattcagacaactgttccccaatctaccagccatctgcaggggtcagtgaccgtggccctctccctcctctagaatgtgccacttatgaagagtgccccatgggaaaaaggagactcagctgtcccttggcagcttgtgccagtatcccagggcagaagtttccacaggagcctcttgcccttgcgcagagccactgtgagaggcggtgggagccaacacccttgggggagggggcagtactgctcggcacatcccagcatcaggtcagatcactgaaattaaaaaatgtgaattaagttcatatccaccttttggggaagcaggacaaaccaccaccccaccaagtgtgtgacttctccatatcccactgcagtttccattttttaaatgggaattttcaatcccctgtgcttgtctaacgtctgctttaaaaagtttgagaccctgttactgtttgaaaatgcatgcatgttacgatgaatctccaacctgaggaaaaaaataaaactcaaaaagctttgtgg

SEQ ID NO: 299 - DNA, 539 bp, Homo sapiens
aaatgatgtactactgcatgtattgcaatactcaggcctcggaaagcttcctttctccccacattggaaggtttttatggttttgtcatttagtatggagcaaaacggttgtatccccctcggtatatactagcctgcaatgaagaaagaacgagacccacatcatcagcatggctcctagtcttggcatcagtcaaaggtgcaaaagcattcatggcaccaacgccgtaggtgggggctggagcaagtgcgtggtggtaggggtcggcagcataaactcgtccgtaactgcagaggtgttacaagaaatttcatctgctgcaacgaagacgaactgatttctgtcactgtaggcagcggcagtggcaggggtaggctgggcgtagcggtatgcagcataaccaccataaatgtctgcaccataaaatccatcctggtaaacaacaccgccgtaggccgggatcgggggcgggggcgccgcggccctgaaggtgttgtacacggtgcgaccgcggcctcgcaggtgcgcccctcggtag

SEQ ID NO: 300 - DNA, 561 bp, Homo sapiens
gcacagtagactgtagtgtgaggctcgcgggggcagtggccatggaggccgtgctgaacgagctggtgtctgtggaggaccttgctgagctgctgcccaaagggagcaaggaggaacagcgggattacgtcttctacctggccgtggggaactaccggctcaaggaatacgagaaggccttaaagtacgtccgcgggttgctgcagacagagccccagaacaaccaggccaaggaactggagcggctcattgacaaggccatgaagaaagatggactcgtgggcatggccatcgtgggaggcatggccctgggtgtggcgggactggccggactcatcggacttgctgtgtccaagtcacaaatcctgaaggagacgcgggagcccacggagaacgctccaggaagggcctgtaccatcctcgctgtcctttccctgttctccccctgccccccgtctctatcctctgtggccttcagctaatttctgctcccctgagattcgtccttcagccccatcatgtgctttgggatgagtgtaaataaaacggggctgtggcttg

SEQ ID NO: 301 - DNA, 804 bp, Homo sapiens
accagatgcccttggtccagtgtgcctcctcttcgccgagggcagaggaccttgcagaagacagtggaagcagcctgtatggccgggcccctgggaggcacacctggtccctgctgctggctgcacttgcctgccttgtccctctgctgcattggaacatccgcagatagaagttttagaaagttctatttttccaaaccaggattccttactattgacagattttctttaccaaaagaaaagacatttattcttttgatgcacttgaatgccagagaactgtccttctttttctcctctccctccctcccagcccctgagtcatgaacagcaaggagtgtttgaagtttctgctttgaactccgtccagcctgatccctggcctgagcaacttcacaacagtaattgcactttaagacagcctagagttctggacgagcgtgtttggtagcagggatgaaagctagggcctcttatttttttctcttaattattattatatttctgagttaaacttagaagaaacaactatcaagctacaacttttcctgccattttcctgtggttgcagcctgtcttcctttgaaattgttttactctctgagttttatatgctggaatccaatgcagagttggtttgggactgtgatcaagacaccttttattaataaagaagagacacaggtgtagatatgtatatacaaaaagatgtacggtctggccaaaccaccttcccagcctttatgcaaaaaaaggggagaatcaaagcttcattccagaaatgtgcgtgaaaagtatctgtat

SEQ ID NO: 302 - DNA, 659 bp, Homo sapiens
caaggaggctcacagtgcttcgacgcattaggttgtgtggtccgccgaggacttgcccggtgacagaagtgctgcttgctgaggtgaccacgatgtgcccggtgcttcctgggaagacgatggtctgctcgtaaggtaggcttgggtttgggaccggcaaggaggtgctgacggttgtggtggctggctgcgacagggggatgttcttgctctggctatacactttgctgtggagccgtacccagtcatgtcccagttggaactcggctctattttcagtttcttcacactacagaaggcacttgattgaagggtgtgaggggagaaaacttgcacatgtgaggccataccttcgtacacgggggccatcggggccggggtgtccgcggttcatggcaacggggacgggaaagcggcgcgcgagctcggcccccccagcctcagtcggaatctgccatcttgagcctgtgtctccgctctcggcgcagcagaggccgcccgcgcccgcatcacagcctcccgtggccggcgccgggggagggggccgggcgcgccgcagcagccgccgccgccgctgccgcccgggcccggcgcggggggctcggggctcggggctcggggcggccgggcgggcggagcggccgaggccgaggcgccga

SEQ ID NO: 303 - DNA, 883 bp, Homo sapiens
tttttttttccatctgaatgtattttaatataaaaataacagctttcccccaattctcgctctaggaaaatgtgctatgctcaccttccctctacccctgtcccatcaggcccagagccaaggccatagggctgctgaatacacatgtgagggggccgaggggaagacaacagtaccaggagggcaggcagggcacccccaggctggccagtggaggggtgggggtatcgatcccgccgggggctggcttggttgctggtgccctgagcccttctctgcccgcctgggtgttgccttcactgatggaggtaggcgtccagccagatgtcacagacttcttcagggacctgacgatgtccaccagcgcggtgaggaagggcttcacttcgtagctgaggccgtgcttggcacacagcgacttgaccagcggggccacccggctgtagttgtgtctcggcatcctggggaagaggtggtgctcgatctggaagttgaggtgcccgctgaaccagttggtgaaaagtgagggctccacgttgcaggtggctgccagctgagagctgacccagtcccggtgcttctcgtggccgatctccttggggatgtggttcatctgtgtgatccacacgaaccagtggctttccaggaccctgtggggaggctcgggcactgccctaggtccagctcaccacttaggcaccctgagtggaggctggagagcagctgtccccaagtggccttgacttccttatctgtacaataggattgtggccatcgcccccttgccagtgtttaaagaatctgaatggagcagtgtccactgtgaggctgagtccagagcagctccgacacccaccgggccacttacaagccagcttagaaa

SEQ ID NO: 304 - DNA, 597 bp, Homo sapiens
aacaatatgtcggacccacggaggccgaacaaagtgctgaggtacaagcccccgccgagcgaatgtaacccggccttggacgacccgacgccggactacatgaacctgctgggcatgatcttcagcatgtgcggcctcatgcttaagctgaagtggtgtgcttgggtcgctgtctactgctccttcatcagctttgccaactctcggagctcggaggacacgaagcaaatgatgagtagcttcatgctgtccatctctgccgtggtgatgtcctatctgcagaatcctcagcccatgacgcccccatggtgataccagcctagaagggtcacattttggaccctgtctatccactaggcctgggctttggctgctaaacctgctgccttcagctgccatcctggacttccctgaatgaggccgtctcggtgcccccagctggatagagggaacctggccctttcctagggaacaccctaggcttacccctcctgcctcccttcccctgcctgctgctgggggagatgctgtccatgtttctaggggtattcatttgctttctcgttgaaacctgttgttaataaagtttttcactcc

SEQ ID NO: 305 - DNA, 631 bp, Homo sapiens
caatgagtgtgatgagatatgcctttcagttttgtcaactgttttagaggcaatggaaccatgcaagaatgttcatgttctacgaacgggattcaggtgagaactctcttatgctttcttcatgtggttttctttgttcctcatatatctggaataaaaaaattgagatgaaaactaaactcctttcttgaggggaggaggggttggggaggctttgttggtagttacagtctttcataccttattaagcttaaaatcctgactctggatgacataggctggaaatacttctcttagggtccataataacaaagatgtgagtaacattgaaatctaaattaatttattttaaaacatagtactggccaggcgcagtgactcatgcctgtaatcccagcactttgggaggccgaggcaggcggatcacgaggtcgggagatcgagaccatggtgaaagcccgtctctactaaaaatacaaaaattagccgggtgtggtggtgggtgcctgtagtcccagctgcttgggaggctgaggcaggagaatggcgtgaacccaggaggcagagcttgcagtgagctgagatcgcgccactgcactccagcctgggcaacagagcgagactctgtctc

SEQ ID NO: 306 - DNA, 748 bp, Homo sapiens
gaactgtcccttgttaattatgtaattcccctgaaatgttataatgaagaaactgaggctccgagagaagtacccgcgcaggttgcacgtggtggagtctagtgggagtcctgtagggtgactcacagcagaagcctggttatgtccccaccacatggaagccttctctgaccccctccccagcctgcccaagcccgatgcttgctctgggctcctgtagtgctggacactcacctcagcagtgcaaggggaagaggcctccaggtcactcctgcctgtggcatagagaaggcatgaagaatggcttggagcacttaaaggctgaggctggggtctgccggtgcctggcatggagtccagaggcctcaggacttgttagaaagatgatttcagcatcttccatcagggccctctgtcatgttcctggcagaagtttaacacttggtcaattagggaaataatgggagacagttgtggtggctctcgcctgtaatcccagcactttgggaggccaagatgggaggatcgcttgagcccaggagctcgaggccagcgtgagtaacatggtaaaaccccgtctctccaaaaaagtgcagagattagctgggcatggtggctcatgcctgtggtcccagctacttgggaggctgaggtgggaggatggcttgaccccaggaggcggaagttgtagtgagctagggtcatgctactgcactccagtctgggcaacagagtgaagctctgtccc

SEQ ID NO: 307 - DNA, 909 bp, Homo sapiens
gccgccgtagcgcgtcttgggtctcccggctgccgctgctgccgccgccgcctcgggtcgtggagccaggagcgacgtcaccgccatggcaggcatcaaagctttgattagtttgtcctttggaggagcaatcggactgatgtttttgatgcttggatgtgcccttccaatatacaacaaatactggcccctctttgttctatttttttacatcctttcacctattccatactgcatagcaagaagattagtggatgatacagatgctatgagtaacgcttgtaaggaacttgccatctttcttacaacgggcattgtcgtgtcagcttttggactccctattgtatttgccagagcacatctgattgagtggggagcttgtgcacttgttctcacaggaaacacagtcatctttgcaactatactaggctttttcttggtctttggaagcatgacgacttcagctggcagcagtggtgaaaagaaattactgaactattgtcaaatggacttcctgtcatttgttggccattcacgcacacaggagatggggcagttaatgctgaatggtatagcaagcctcttgggggtattttaggtgctcccttctcacttttattgtaagcatactattttcacagagacttgctgaaggattaaaaggattttctcttttggaaaagcttgactgatttcacacttatctatagtatgctttttgtggtgtcctgctgaatttaaatatttatgtgtttttcctgttaggttgattttttttggaatcaatatgcaatgttaaacacttttttaatgtaatcatttgcattggttaggaattcagaattccgccggctctattactggtcaagtacatcttttctcttaaaattatttagcctccattattac

SEQ ID NO: 308 - DNA, 603 bp, Homo sapiens
gtgatggggagccgcctcgcacccctgttgtctgcttgtctctttgtgtctgttatcctgggcaggatggtcattctcaaaaaccctggggtcctgggccagagacaggcagggcccagtccaggggccccaggcctccccagtcccagtgtgcgagccccacttggacacaagtgttcagagaggtccccctctgccacttgacagggaccttcaaacctcgacagctccagctcccttgacctaccttcctccccgcaccccgcccccaccttgtgcccctgtgtccagccccccagggggcctgtgtctgtgtctgtgcctgtgtctgtgatggggagccgcctcgcacccctgttgtctgcttgtctctttgtgtctgttatcctgcccgcgtgggggatcccctttcccacatccgtgctgtgtcattgttgctctgcttcctttcaatgtgtcagtgcctggggggaggggaggagcaccccctcagcccccctgaacctgaccaaaagccatggctgttgctcccccctttgtatgatgcaaatgctgaaatgtacaaaatcaaccatgacaacaaagaaaaagaccttgtacagc

SEQ ID NO: 309 - DNA, 314 bp, Homo sapiens
ggagacctggtgccctcaggcatcgttttggagctcctgaaggaggccatggtggccagcctcggggacaccaggggcttcctgattgacggctatcctcgggaggtgaagcaaggggaagagttcggacgcaggattggagaccccgccgagcccctcctcccagtattcccatccccgcatgcttctagggagcgcctcttttccgttcttgaggaatttctgttctggggcttgtccttcctttgcagctgttttgaatgtagttttccttttctatttatttgcacattaaagttaataattgaatattg

SEQ ID NO: 310 - DNA, 677 bp, Homo sapiens
gtgtgttcatctgcagcccttgcctgaggataaggtttaggattgggtaaagatcagaataccagggccagctaaggcaacgactccctccccaaacccttgggacctcagccagtcccaaggctgccctgacaatcaggcaggctccccaccgtgaggccaagcctcctctgccactgccagcatggcccaagggaggcttggccttgggcttgccagcctcagctctgccctgacaagggtcttgtatccagggcagaggcctgaggtgacccaggcttgctttgtggctgatgccagcaggcttggttctagtgggcaccactggtgggcaacctccataactggcccttaggccctaccttcctacacagctaggctataatgggcctgagtgagagggtagcttccccagccccaagcacaggcagaggggtggagagcaatttttggttttatttttgtttctgaagtggtgcctgtacctccagcccccagggggccttccctggccacacttctctgccccaccaggcatcgccatcccagcactttgctccatgtcacccgtaagatgccctttgctgaatgtacctgagtgtatgtatttaaaaggactcacatgggcatcagagaatttatggctctgtatccaataaaaaagatggtgaaactgg

SEQ ID NO: 311 - DNA, 766 bp, Homo sapiens
ctcaaagtgggaaggttttgggggagggggaaatacagggatggtccatgttttcaagagtaggggaatgatgtttaaacacaaaaataaattttttttcatttccagaaacactatttatttatggtttttttttttaattttttctttttgggggtgaaattggcagatgcctgaggtcatagctgtgtcctgggtcactgtggctggtgaggacctcaaggaccccatcaagtgtacacagcagcagcaaaatcaagggatgaccctcctctggggccccctgtcctcagcacattccaggcagctgtgccctgacccacagggacccgtggggatgggaggaggtccaggcctgtgttgccagagctggcagtgtgagctgtaggcagggacggggagggactgtcgctgtgatcagagtgggttaagctgaccaggaacacccatttaacccctttttctttttgctttcatttttataaaggaaaagaggacctgtcagataggcagccccatgctacgtgattctttatgttgtgttgttttgttttgtaaattgtataatttttaaatatctgagttttaaaaaaagaaaaaagtacaaaaaaatcttgttatggccttaagaaggggttagtgcatctttcaggggtcactctgccatggggataaaatagctgtttcacaaacagttttatttaaaaaaacaaaaaacaaaaaaaatcaaaaaatcaaaaaaataataaacttcattttaacctcg

SEQ ID NO: 312 - DNA, 550 bp, Homo sapiens
gtttcagggagaggggtgagcggagggagacctgtgtccgtgccgtccggctccctgggtgggaacaggcaagggatcagatgcccctgacaccacgcctctggccacaccagatgcctctgcagtcctcgacagcctcttcagtgtccctcctgcggtgatgtccttactgtccccagccagggccggggaccggtgtttcactgaggacctgcattagaaacattttttaaattgttgtacaggaagagatgtgtctaaaacagcatcttaaagctgagtgtatttctttgcacaaggggtcatgctgatgaattcttctttcattctgatctttgttcagccaacaggagcgtccttttctaatgtcttccattcctaccccccacccaaaaacaaaagaaatatttgtagcttgctatctgtatttgaatttttagcaattttatatttagatactttgaaaaatgtaaatgactaatttggtcattaaatcttgtgacatattcgatattaaaatgatattaaaataaaagtcatataaatacac

SEQ ID NO: 313 - DNA, 868 bp, Homo sapiens
ggccccctggccatgggcctggcccagccccgactcctttctgggccctcccaggagtcaccccagaccctggggaaggagtcccgcgggctgaggcaacaaggcacgtcagtggcccagtctggtgcccaagccccaggcagggcccatcgctgtgcccactgtcgaaggcacttccctggctgggtggctctgtggcttcacacccgccggtgccaggcccggctgcccttgccctgccctgagtgtggccgtcgctttcgccatgcccccttcttagcactgcaccgccaggtccatgctgctgccaccccagacctgggctttgcctgccacctctgtgggcagagcttccgaggctgggtggccctggttctgcatctgcgggcccattcagctgcaaagcggcccatcgcttgtcccaaatgcgagagacgcttctggcgacgaaagcagcttcgagctcatctgcggcggtgccaccctcccgccccggaggcccggcccttcatatgcggcaactgtggccggagctttgcccagtgggaccagctagttgcccacaagcgggtgcacgtagctgaggccctggaggaggccgcagccaaggctctggggccccggcccaggggccgccccgcggtgaccgccccccggcccggtggagatgccgtcgaccgccccttccagtgtgcctgttgtggcaagcgcttccggcacaagcccaacttgatcgctcaccgccgcgtgcacacgggcgagcggccccaccagtgccccgagtgcgggaagcgctttaccaataagccctatctgacttcgcaccggcgcatccacaccggcgagaagccctacccgtgcaaagagt

SEQ ID NO: 314 - DNA, 592 bp, Homo sapiens
cttaaaagcggcgtctcaccaggagaccacgtcctggaagtgtccgggactcgcgggacctgtggctgcagaccccgccggcacgcaggcccagagctggcgcactcctgaggatgagactctgggggccctagccggggtccacgggagggctgtccttggggactctaggatggcttcgttctggcccggctcacttctggagctgtgagacccaagacaaaaggggctgagggatttctcattgacaagagttcgtgcgggaaaaccacctgatccctagggatttgtcatcttaagactcaaaaggcttaataccaggaaccaccttggcaagatatttacccaccggccatctctgtttactcatgaatgttaaatgttaaaacgcagcgctctaaccttgcatattatttacttgcaaatgtcctgtaatctgtaattgtgatgcctctgatggaataaaattatcttttttcagtctcctcctaaaaaaaaaaaaaaaaaaaaaaaaaaaaaaaaaaaaaaaaaaaaaaaaaaaaaaaaaaaaaaaaaaaaaaaaaaaaaaaaaaaaaaaaaaaaaaaaaaaagg

SEQ ID NO: 315 - DNA, 405 bp, Homo sapiens
gaagaggccagcaagaaccctgaagccaagggtctgagcagagggagttggcaggcctagctcctatgccccactccgaccctccctgctcatgcggcagtgggtgggtgaggtgggctgggggcctggaggagtgcctttgaggaggtcagtcctggcaggtggacagaggacgcctggcatgggctgcttactgggaccccaggcggccctggccatggccacagtcttccttcttttggcgtgtgggctggtaccagatctggggattttctaaagggactggggggaggggagggcattgtcaatggtggtatctttagcctgagacagaagatttttaaaggcaaaattatatttctggtttgttgtttcagaagaccaataaagactgtattttcctat

SEQ ID NO: 316 - DNA, 771 bp, Homo sapiens
cgcgggccgggccgggacggggactgtcggctgcaggcggccatgcccaccaacttcaccgtggtgcccgtggaggctcacgccgacggcggcggggacgagactgccgagcggacggaggctccgggcacccccgagggccccgagcccgagcgccccagcccgggagatggaaatccaagagaaaacagcccattcctcaacaatgtcgaggtggaacaagagagcttctttgaagggaagaacatggcacttttcgaggaggagatggacagtaaccccatggtgtcctcgctgctcaacaagctggccaactacaccaacctgagccagggcgtggtggagcacgaggaggacgaggagagccggcggcgggaggccaaggctccgcgcatgggcaccttcatcggcgtctacctgccgtgcctgcagaacatcctgggcgtcatcctcttcctgcgcctgacgtggatcgtgggggtggctggtgtcctggagtccttcctcatcgtggccatgtgctgcacatgtacaatgctgaccgccatttccatgagtgcgatcgctaccaacggtgtggtcccagctggcgggtcctactacatgatatcgcgctcgctgggacccgagtttggaggcgctgtcggcctctgcttctacctgggcacgacgtttgcaggggccatgtatattttggggaccatcgagatttttctgacgtacatctccccgggtgcggccatcttccaggcggaggctgcaggtggcgag

SEQ ID NO: 317 - DNA, 664 bp, Homo sapiens
ctctgggaggctttggaatgatgaaagcatgtaccctccacccttttcctggccccctaatggggcctgggccctttcccaacccctcctaggatgtgcgggcagtgtgctggcgcctcacagccagccgggctgcccattcacgcagagctctctgagcgggaggtggaagaaaggatggctctggttgccacagagctgggacttcatgttcttctagagagggccacaagagggccacaggggtggccgggagttgtcagctgatgcctgctgagaggcaggaattgtgccagtgagtgacagtcatgagggagtgtctcttcttggggaggaaagaaggtagagcctttctgtctgaatgaaaggccaaggctacagtacagggccccaccccagccagggtgttaatgcccacgtagtggaggcctctggcagatcctgcattccaaggtcactggactgtacgtttttatggttgtgggaagggtgggtggctttagaattaagggccttgtaggctttggcaggtaagagggcccaaggtaagaacgagagccaacgggcacaagcattctatatataagtggctcattaggtgtttattttgttctatttaagaatttgttttattaaattaatataaaaatctttgtaaatctcc

SEQ ID NO: 318 - DNA, 706 bp, Homo sapiens
cagagaagcgtgaaggcctggctgccgggcaggtgaactctccacggggtctagggcccgcgaaagggttcggaaccgagtcagcgcgccttgcgggcaggattcacgccgctgtgacccggaggtcctcagggggcgaagccccggcctaggcctcgcggagatgcccagctgcggtgcttgtacttgcggcgcggcggccgtccggctcatcacctcctcactcgcctccgcgcagagaggtatttctggtggtcgcattcatatgtcagttttaggaaggcttgggacatttgaaactctgattctgcaaagagctcctcttagatcctttacagaaacaccagcatactttgcctcaaaagatgggataagtaaagatggttctggagatggaaataagaaatcagcaagtgagggaagtagtaagaaatcaggctctgggaattctgggaaaggtggaaaccagctgcgctgtcctaaatgtggcgacttgtgcacacatgtagagacctttgtatgtaagtattacatcttctactgttcttttttccctacattttctgtaaattactaagtgtataaaaatatgtaaattatgtaaaatgtataaatataggccaggtgcaaacggcttatgcctataatcctagcactttggaaggaggaggtgggagaatcccttgagcctaggagttcaagacct

SEQ ID NO: 319 - DNA, 493 bp, Homo sapiens
accaccctctcgcctgtccccgcttgccgtggcgctgctgcctgggttataaacataaccacccagccgcactcccgggaagggcctcctcggtggctcttcaccatggggcccggggccacggcccttgtgacatggggcaccctcctggctgctggttatttttatgatcaccccgcacttgcatgcctccccgatatgtctgccagccctgcggatgtggccgcctgggacgcgggtctaccctgagcagatcgtggtctgggccgtggcttcctttaggggaaaattcaggatcctggctgagcctgggagcgcttcctgcctcctgcccctccacgtgggttgtgtggaagcacccagtcctcgtggagaaacactggacgtgtctctctacaaaagagcttttactgttagtggtctagttttttttttttctgtttctcaaaattaatcagtgacatagagagctgccaatcagactgcagtctgt

SEQ ID NO: 320 - DNA, 514 bp, Homo sapiens
ctcgcacctggagagcacctcagatcccaggcggggaggcccctgcaggcctgcagtgcccggaggcctgagcatggctgtgtggaaagcgtgggtggcaggcatgtggctctccttgccgcccctcaacctgagatcttgttgggagacttaatggcagcaggcagccatcactgcctgcttgatgctgcactgagctggacagggggagtccgggcaggggactcttggggctcgggaccatgctgagctttttggcaccacccacagagaacgtggggtccaggttctttctgcaccttcccagcacatgcagaatgactccagtggttccatcgtcccctcctgccctgtgtacctgcttgcctttctcagctgccccacctcccctgggctggcccactcacccacagtggaagtgcccgggatctgcacttcctcccctttcacctacctgtacacctaacctggccttagactgagctttatttaagaataaaatcgtggtggtggt

SEQ ID NO: 321 - DNA, 395 bp, Homo sapiens
ggggaacagtggcgcggctggggcgggcggaggaagtgggggagccaaggagacaccccagcgctggatccggcaagtcctccctctgagtggccagggggcctcgtcccttctcccgatgccttctgcccttccttgggtctccggaacccagcttgtcctaaccgctttcgctgcgggcagcgctggccacgcggcccccgccgccggcggttctccgtggccaagcatccttggccttggagcccaggggctgcgttccccttggggccggggcgggagagaggacctcggtggtactcgcccgtgcgctgggcgcagccgcttggccctcagccctctggcgcggcgcccacccgctgggtcccgccccggcagcgacgcagggataaccc

SEQ ID NO: 322 - DNA, 550 bp, Homo sapiens
  misc_feature 332,405: n = a,t,g, or c
tacagaaattaccgcgttctgtgtgaagggactgagggtgtggtgtcattggcagagggtcattttaggagagctgccccagcccctcgaacgcctggcttggggtgtcattctgcctggcggccaggcctccagcttcccctgccccgggcctggggctgtcactggccctgatccgaacacctccagattccggcttctacatgggacagacggggacgcacaggccaccttccttctggcagggactcttatttattcccattgctctagggctttcggtttccccttcttccggtaggccgcgtagaggcatgcaccgggtaggtttncgcggtgaccccgcggcggcctgagggacgctccctgccccatcccggctgttgggctgggccgctttgcctntgcttcgccctgtgctgtgttctccagctttgtagcagcagccttgacaaacccaggcgcactgtaccaaggcaatgtaacttttgattttcggtcaatttaagttcttttgtcaccaaatattaataaacagttttgacttcag

SEQ ID NO: 323 - DNA, 415 bp, Homo sapiens
gttctgtcgggaggacagtgctgatcgtgtctcagcatcaggaaaggagaaaggcagagggagagcgctgagaagactgttcacgccagagtgcttatttatttttaatttactgctataggataagcaaccaggtagtgttcctaacaattagcgttaccaaaattaaagttcaaattatatgtttaaaatattgtagaagatatatatttatactggactacttttacaccttctaatatcctgtccaagtttgggcgcagatggtggagttgggctggcatcatgtcctgtggccgccccacttgcctgttggtgccactccatcccgggccccagggatgccagctcagggctgaccacagcagccctgcgtgggcatcacctcctaccccagcccccatcctgggctgct

SEQ ID NO: 324 - DNA, 763 bp, Homo sapiens
gcctcgattgggtggctctggctgccaggaagattccagccccattccggccccaaatccgctcagagctggatgtgggcaactttgcggaggaattcactcggctggagcctgtctactcaccccctggcagccccccacctggggacccccgaatctttcagggatactcctttgtggcaccctccattctctttgaccacaacaacgcggtgatgaccgatgggctggaagcgcctggtgctggagaccggccaggtcgggcagcggtggccaggagcgctatgatgcaggactcgcccttcttccagcagtacgagctggacctgcgggagcctgcgctgggccagggcagcttttctgtgtgtcgccgctgccgccagcgccagagcggccaggagttcgcagtcaagatcctcagtcgcaggctggaggcgaacacgcagcgcgaagtgggtgccctgcgcctgtgccagtcacaccccaacgtggtgaatctgcacgaggtgcatcacgaccagctgcacacgtacctggtcctggagctgctgcggggcggggagctgctggagcacatccgcaagaagcggcacttcagcgagtcggaagcaagccagatcctgcgcagcctcgtgtcggccgtgagcttcatgcacgaggaggcgggcgtggtgcaccgcgacctcaagccggagaacatcctgtaagccgacgacacgcccggggccccggtgaaaatcatcgacttcgggttcgcgcggtt

SEQ ID NO: 325 - DNA, 1080 bp, Homo sapiens
ccacgcgtccggctgcccctgttgctgaccatgattcttttcctgggcccactgatgcagctctctatggattgcccttgtgacctggcagatgggctgaaggttgtcctggccccccgctcctgggcccgctgcctcacagacatgcgttggctgcggaaccaagtgatcgccccgctgacagaggagctggtgttccgggcctgtatgctgcccatgttagcaccgtgcatgggcctgggccctgctgtgttcacctgcccgctcttttttggagttgcccattttcaccatattattgagcagctgcgtttccgccagagcagcgtggggaacatcttcttgtctgctgcgttccagttctcctacacagctgtcttcggtgcctacactgctttcctcttcatccgcacaggacacctgattgggccggttctctgccattccttctgcaattacatgggtttcccagctgtttgcgcggccttggagcacccacagaggcggcccctgctggcaggctatgccctgggtgtgggactcttcctgcttctgctccagcccctcacggaccccaagctctacggcagccttcccctttgtgtgcttttggagcgggcaggggactcagaggctcccctgtgctcctgacctatgctcctggatacgctatgaactctcaccggctccccagccctccccaccaaggggtactgcaggggaagggctggctggggtccccgagatctcaggaatttttgtaggggattgaagccagagctagttgcgtcccagggaccaagagaaagaagcagatatccaaagggtgcagccccttttgaaaggggtgtttacgagcagctgtgagtgaggggacaaggggcaggtcccaggagccacacactcccttcctcactttggactgctgcttctcttagctcctctgcctctgaaaagctgctcggggttttttatttataaaacctctccccaccccccaccccccaacttcctgggttttctcattgtctttttgcatcagtactttgtattgggatattaaagagatttaacttgggt

SEQ ID NO: 326 - DNA, 1549 bp, Homo sapiens
ccacgcgtccgcggacgcgtggggtcctggacctcctgtgcaagaacatgaaacacctgtggttcttcctcctgctggtggcagctcccagatgggtcctgtcccaggtgcagctgcaggagtcgggcccagggctggtgaagccttcacagaccctgtccctcacctgcactgtctctggtggctccatcagcagtggtgattatgattactattggagttggatccgccaggccccagggaagggcctggagtggattggctacatccatcatagtgggagcgcctattacaacccgtccctcaagagtcgagttatcctatctgtagacacgtccaggaaccagttctccctgagtctgagtgctgtgacggccgcagacacggccgtatattactgtggcagagtgaagggatggtatgcggagaaaccagagtggatcgacccctggggccagggaaccctggtcatcgtctcctcagcatccccgaccagccccaaggtcttcccgctgagcctcgacagcaccccccaagatgggaacgtggtcgtcgcatgcctggtccagggcttcttcccccaggagccactcagtgtgacctggagcgaaagcggacagaacgtgaccgccagaaacttcccacctagccaggatgcctccggggacctgtacaccacgagcagccagctgaccctgccggccacacagtgcccagacggcaagtccgtgacatgccacgtgaagcactacacgaatcccagccaggatgtgactgtgccctgcccagttcccccacctcccccatgctgccacccccgactgtcgctgcaccgaccggccctcgaggacctgctcttaggttcagaagcgaacctcacgtgcacactgactggcctgagagatgcctctggtgccaccttcacctggacgccctcaagtgggaagagcgctgttcaaggaccacctgagcgtgacctctgtggctgctacagcgtgtccagtgtcctgcctggctgtgcccagccatggaaccatggggagaccttcacctgcactgctgcccaccccgagttgaagaccccactaaccgccaacatcacaaaatccggaaacacattccggcccgaggtccacctgctgccgccgccgtcggaggagctggccctgaacgagctggtgacgctgacgtgcctggcacgtggcttcagccccaaggatgtgctggttcgctggctgcaggggtcacaggagctgccccgcgagaagtacctgacttgggcatcccggcaggagcccagccagggcaccaccaccttcgctgtgaccagcatactgcgcgtggcagccgaggactggaagaagggggacaccttctcctgcatggtgggccacgaggccctgccgctggccttcacacagaagaccatcgaccgcttggcgggtaaacccacccatgtcaatgtgtctgttgtcatggcggaggtggacggcacctgctactgagccacccgcctgtccccacccctgaataaactccatgctccccc

SEQ ID NO: 327 - DNA, 1635 bp, Homo sapiens
ccacgcgtccgcttctcttcactcagccaactgctcgctcgctcacctccctcctctgcaccatgaccacctgcagccgccagttcacctcctccagctccatgaagggctcctgcggcatcgggggcggcatcgggggcggctccagccgcatctcctccgtcctggccggagggtcctgccgcgcccccagcacctacgggggcggcctgtctgtctcatcctcccgcttctcctctgggggagcctacgggctggggggcggctatggcggtggcttcagcagcagcagcagcagctttggtagtggctttgggggaggatatggtggtggccttggtactggcttgggtggtggctttggtggtggctttgctggtggtgatgggcttctggtgggcagtgagaaggtgaccatgcagaacctcaatgaccgcctggcctcctacctggacaaggtgcgtgctctggaggaggccaacgccgacctggaagtgaagatccgtgactggtaccagaggcagcggcctgctgagatcaaagactacagtccctacttcaagaccattgaggacctgaggaacaagattcttacagccacagtggacaatgccaatgtccttctgcagattgacaatgcccgtctggccgcggatgacttccgcaccaagtatgagacagagttgaacctgcgcatgagtgtggaagccgacatcaatggcctgcgcagggtgctggacgaactgaccctggccagagctgacctggagatgcagattgagagcctgaaggaggagctggcctacctgaagaagaaccacgaggaggagatgaatgccctgagaggccaggtgggtggagatgtcaatgtggagatggacgctgcacctggcgtggacctgagccgcattctgaacgagatgcgtgaccagtatgagaagatggcagagaagaaccgcaaggatgccgaggaatggttcttcaccaagacagaggagctgaaccgcgaggtggccaccaacagcgagctggtgcagagcggcaagagcgagatctcggagctccggcgcaccatgcagaacctggagattgagctgcagtcccagctcagcatgaaagcatccctggagaacagcctggaggagaccaaaggtcgctactgcatgcagctggcccagatccaggagatgattggcagcgtggaggagcagctggcccagctccgctgcgagatggagcagcagaaccaggagtacaagatcctgctggacgtgaagacgcggctggagcaggagatcgccacctaccgccgcctgctggagggcgaggacgcccacctctcctcctcccagttctcctctggatcgcagtcatccagagatgtgacctcctccagccgccaaatccgcaccaaggtcatggatgtgcacgatggcaaggtggtgtccacccacgagcaggtccttcgcaccaagaactgaggctgcccagccccgctcaggcctaggaggccccccgtgtggacacagatcccactggaagatcccctctcctgcccaagcacttcacagctggaccctgcttcaccctcaccccctcctggcaatcaatacagcttcattatctgagttgcat

SEQ ID NO: 328 - DNA, 1054 bp, Homo sapiens
ccacgcgtccgcccacgcgtccgcggaggggagcaagagcccggagccgtcaggttcctggacctgccctgggaagacgtgctgctcccacacgtcctgaaccgggtcccgctgcgccagctgctccggctgcagcgcgttagccgggccttccggtcgctggtgcagcttcacctggccgggctgcgtcgcttcgatgccgcgcaggtgggtccgcagatcccgcgggccgcattggcccggctgctgcgggatgccgaggggctgcaggagctggcactggcgccgtgtcacgaatggctgtcagacgaggacctggtgccggtgctggcgcggaatccgcagctgcggagtgtggcgttgggcggctgcgggcaactgagtcgccgggcgcttggggctttggccgagggctgcccacgcctgcagcgcctgtcgctcgcgcactgtgactgggtggacgggctggcgctgcgcggcctcgctgatcgctgcccggccctggaggagctggatctcaccgcctgccgccagctcaaggacgaggccatcgtgtacctggcgcagaggcgcggcgctggtctccgcagcctctctctggccgtcaacgccaacgtgggggacgccgcggttcaagagttggctcggaactgcccagaactccaccaccttgacctcaccggctgcctccgcgtcggaagcgacggtgtcaggacattggccgagtactgccccgtgctgcgttcgctgcgggtgcggcactgccaccatgtggcggagtccagcctgagccgcttgcggaagcgcggcgtggacatcgacgtggagccgccgctgcaccaggccctggtgctgctgcaggatatggcgggcttcgcaccttttgtcaacctgcaggtctgacccgcctgccaatcggagcacagctggactgtgtggctggggcctgacactgagctgtagggaaactgaactgtgaggacctctggtgagaggccagtgccctgccccaccctggagcttcaaataaagagctttttaccccctcttgaag

SEQ ID NO: 329 - DNA, 1159 bp, Homo sapiens
ccacgcgtccggatacacagtgtttatttttcttcataaaaagatgcaagctgtgcgcctccaaatgctggcagctcagaatattccatttgtttgtgaagagacagactggatggcacaatttcaatcaaactatgaaatgcaggctggcatgcctggagagaaagatcataacagtgtgtactcttctttctgagaagccgcggactgcacacgtggttaactcatcagcccctggaaggcgtcctggtggatgtgttccatcagccatggcaaagcaggaaggggactctgtcaaagctgtctgtcctctccctggggacaggcggggccacatgacacatgctgtgccacattgattcactctgggtggaaggggttgtgtcctttgaattcccaaatggaaatggctagagtttttttttttctaattacaaaagtaataaatggtcatttacattttttccaggaataaaaagactaaagactaaacaacacaccaaacaaaaaagaactccacgaggactataatttcttcttgatttttatccatctgcctgtctataactgacctgccttttgcaaccataggcttctctccaagtacacatatagagatctataccttaatttttatggctgaatgttattccaccgtgtagctatatcagccccctattgagagatggttggttacgggttgtttttttcttttaaaaactatactatgttgaatatccttatgcatctcactccctttgttttcctaattgttttgggtaaacttctagcggtggaattgctggagaaatgcatttgatcaacattcctgaactgccctccccaaagtctgcgtgaatgacacccacccccgtcgcttatgaggctgatcccagcttcacacctgcattatcaacgcagggcacaaatctttgtcactttctggagtgattttctcttagatttctgaatgattagcataccttgacatggtaaacctttatataataaagtttttaatttttcttattaacatgaattgtagctatatgaaatattttattggttgtctgctttcttatttcagctttccattatgacaatgattaaacgttgaagaaagttgaaatagtagtacaataaacatccatataccctc

SEQ ID NO: 330 - DNA, 1685 bp, Homo sapiens
ccacgcgtccggtgacatgcaaatagggcccttcctctcctgatgaaagccagcccagtcctgaccctgcagctctgggagaggagccccagccttgggactcccaagggttttcactcagtgatcagaactgaacacagacgactcaccatggagtttgggctgagctggattttcctggtcgttattttaaaaggtgtccagtgtgaggtggaggtggtggaatccgggggaggcttggtaaagccgggggggtcccttaaactctcctgtgtagcctctggattcactttcaataaggcctggatgaactgggtccgtaaggctccagggaaggggctggagtgggttggccgtattaaaagtgaggctgatggtgggacaatcctctacgctgcacccgtgaaaggcagattcaccatctcaagagacgactcaaagaacaccctatatctgcacatgaacagcctgaacaccgaagacacagccctctatcattgtatgggtgggggtttatatgcagcgaccaatgaagccttcgatgtctggggccaggggacaatggtcaccgtctcgtcagcatccccgaccagccccaaggtcttcccgctgagcctctgcagcacccagccagatgggaacgtggtcatcgcctgcctggtccagggcttcttcccccaggagccactcagtgtgacctggagcgaaagcggacagggcgtgaccgccagaaacttcccacccagccaggatgcctccggggacctgtacaccacgagcagccagctgaccctgccggccacacagtgcctagccggcaagtccgtgacatgccacgtgaagcactacacgaatcccagccaggatgtgactgtgccctgcccagttccctcaactccacctaccccatctccctcaactccacctaccccatctccctcatgctgccacccccgactgtcactgcaccgaccggccctcgaggacctgctcttaggttcagaagcgaacctcacgtgcacactgaccggcctgagagatgcctcaggtgtcaccttcacctggacgccctcaagtgggaagagcgctgttcaaggaccacctgagcgtgacctctgtggctgctacagcgtgtccagtgtcctgccgggctgtgccgagccatggaaccatgggaagaccttcacttgcactgctgcctaccccgagtccaagaccccgctaaccgccaccctctcaaaatccggaaacacattccggcccgaggtccacctgctgccgccgccgtcggaggagctggccctgaacgagctggtgacgctgacgtgcctggcacgcggcttcagccccaaggacgtgctggttcgctggctgcaggggtcacaggagctgccccgcgagaagtacctgacttgggcatcccggcaggagcccagccagggcaccaccaccttcgctgtgaccagcatactgcgcgtggcagccgaggactggaagaagggggacaccttctcctgcatggtgggccacgaggccctgccgctggccttcacacagaagaccatcgaccgcttggcgggtaaacccacccatgtcaatgtgtctgttgtcatggcggaggtggacggcacctgctactgagccgcccgcctgtccccacccctgaataaactccatgctccccc

SEQ ID NO: 331 - DNA, 1942 bp, Homo sapiens
ccacgcgtccgctttgtgcgcatgtgcggggaggtgagggggcttggggggcctcgcctgagagagtgaggacaggctgcgggaggagctgcaggactgaggtacagaggccaggggcccagggcaggacccagcctggacttgactccctgggatcccaggaagggcacaccctttcctcaccacccgagtgagcgctgccccctcacagagacctctttgccccctgggccaggcagagcaggcgctgcggtccgggaggccccatggaggtggcggtgcccgtgaagcaggaggccgagggcctggcgctggactccccgtggcaccgcttccgccgcttccacctgggcgacgcgccgggcccgcgggaggcgctggggctgctccgcgccctgtgccgggactggctgcggcccgaggtgcacaccaaggagcagatgttggagctgctggtgctggaacagttcctgagcgcgctgcccgccgacacgcaggcctgggtgtgcagccggcagccgcagagcggggaggaggcggtggccctgctggaggagctctgggggccagcagcctcccccgatgggtcgtcagcaacgagggtgcctcaggatgtgacgcagggccctggggccacaggtggaaaggaggacagtgggatgattcccttaggcaccgcccctggggctgaggggccggcgcctggggactcccaggctgtgcgcccctacaagcaggagcccagcagccccccgctggcgcctggcctgcccgccttcctagcggccccgggcaccacgtcctgccccgagtgcggcaaaacgtccctgaaaccagctcacctgctgcgccaccggcagagccactcgggcgagaagccgcacgcctgccctgagtgcgggaaggcctttcggcgcaaggagcacctgcggcgccaccgcgacacgcaccccggcagccccggcagccccgggcccgcgctgcgccctctgcccgcccgtgagaagccccacgcgtgctgcgagtgtggcaagaccttctactggcgcgagcacctggtgcgccaccgcaagacgcactcgggagcgcggccctttgcctgctgggagtgtggcaagggcttcgggcgccgcgagcacgtgctgcgccaccagcgcatccacggccgggcagcggccagcgcgcagggggcggtagctccgggcccggatggtggaggccccttcccgccctggcccttgggttagccgcctcccggccagcgccatctcccgcccttggtgctgcccccgggcggtacctgctctctcccagcgccacttggcctcttcctctcctccttccctcccatcgtcctcctccacctgcgcctcccttgtctgaacttcccaacgccttcctattcctttccaactccttttcccccaaatttcactttccttctcaggtctcacctcagccccccccttctccctgatttctcggcctctctctctgtgtgaaggggcctctccataatgtctcctccttcccccctcttctctctcctgcggcccagcctccctctccctcctccattcctctctccctgcccttttcctgcctgaagagcagaggtgaggacctgggacccctgaggggcaggccaggaggagctcgggcgcaggccaggcccccttggtgaagcagaggctgaaggaaaggggtctgggtcttgtccctaggaattctcctccctcaggagattgggggttgggggaggcagcgggtgatggctctgaagctgaacccagggcctggctgtggtcttcttggtcttgctgccccctgtgacccaaaggcatgggatggacagagatgcctgcccccgtgaagctggttggggagggcaagtttcaccaggcatccatagagtaataaagtcactgtgtgtagacccggg

SEQ ID NO: 332 - DNA, 1153 bp, Homo sapiens
ccacgcgtccggaggaaatgtatatagaaaagttatttgatcaatggtacagcagttccatgaaagtcatttgcgtgtggttgactgatagattagacctccaactccatatttaccagctgaagacgctcatcaagattgtgaagaaaacctacagggactttcgattgcagggtgtgttggaaggaacactgaacagtaagacttatgatactgtgcacagacgtttaacagtagaggaggccacagcctctgtttcagaaggaggaggacttcagggcattactatgaaagacagtgacgaagaagaagaaggctgatatcacacagctttgcagaaggaaggaagaccttgatcgacattgttttttatttttttaaccttgtccttgtaattacattcattgtttgttttggccaaataaaaatgcttgtatttctttaaaaagtaagcctgaatgtagagtaaaaggggaaatgccaagattttggggtttttttgtttcctttttttgtttgtttgtttgtttttttggagaagagcatcctcttttgtgtagtttgacctaaaaatgaaccttggctctgcttgtgatcagaacatgaacttttttttttaaagaagatttgagcatttttctgtaatcacatcaaaatgatgttttctgtgtaaagcgagatacatatttctcataatgcagcattgtgagaagtcagttcggaccactgcaccaacactgtcgtatccttgttaaaatggtgtgtaccttacaaattataatttatgtgccaggttcgttttgtacttaatttgctattattgtgatgtgtataaaatctttaatcttggttcttagtactttgaattggtctacaggtatattcctgggatgaaaggattgccaaacccaaatatagactagattatccaatgggtttgtgtctttgttccattctcaacatttcttctttcaactataagtaatccccaggtgtggggtagcaagtgtgcttccgtcaagataccatattctcctgctccagtataacagcttgcaggcaataaaaatctatttgctcataactacttctgtatttattagacttatatagagcaaatgcagtaaaagaggtttgcagtgtttcaaacatc

SEQ ID NO: 333 - DNA, 1631 bp, Homo sapiens
  misc_feature 1255: n = a,t,g, or c
ccacgcgtccgctagatcgcgagcggccgctcgcgatctattactaggccctgggactccaaggcctttccacttggtgatcagcactgagcacagaggactcaccatggagttggggctgagctgggttatccttgttgctattttccaaggtgcccagtgtgaggtgcagttggtggagtctgggggaggcttggtccagcggggggggtccctgagactctcctgtgtggcctccggattcatgatcactgactattggatgagttgggtccgcctggctccagggaagggcctggagtgggtgggctaacataaaaccagatggaagtatacaagaatgtcggccctctgtgaggggccgattcaccgtttcccgagacatcgccccagaactcagtgtctctccaaatgaacagcctgagagtcgacgacacgggcatttatttttgcgcgacccaagactcgtcccagcatctctactggggccagggaaccctggtgaccgtctcctcagcctccaccaagggcccatcggtcttccccctggcgccctgctccaggagcacctccgagagcacagcggccctgggctgcctggtcaaggactacttccccgaaccggtgacggtgtcgtggaactcaggcgctctgaccagcggcgtgcacaccttcccggctgtcctacagtcctcaggactctactccctcagcagcgtggtgaccgtgacctccagcaacttcggcacccagacctacacctgcaacgtagatcacaagcccagcaacaccaaggtggacaagacagttgagcgcaaatgttgtgtcgagtgcccaccgtgcccagcaccacctgtggcaggaccgtcagtcttcctcttccccccaaaacccaaggacaccctcatgatctcccggacccctgaggtcacgtgcgtggtggtggacgtgagccacgaagaccccgaggtccagttcaactggtacgtggacggcatggaggtgcataatgccaagacaaagccacgggaggagcagttcaacagcacgttccgtgtggtcagcgtcctcaccgtcgtgcaccaggactggctgaacggcaaggagtacaagtgcaaggtctccaacaaaggcctcccagcccccatcgagaaaaccatctccaaaaccaaagggcagccccgagaaccacaggtgtacaccctgcccccatcccgggaggagatgaccaagaaccaggtcagcctgacctgcntggtcaaaggcttctaccccagcgacatcgccgtggagtgggagagcaatgggcagccggagaacaactacaagaccacacctcccatgctggactccgacggctccttcttcctgtacagcaagctcaccgtggacaagagcaggtggcagcaggggaacgtcttctcatgctccgtgatgcatgaggctctgcacaaccactacacacagaagagcctctccctgtctccgggtaaatgagtgccacggccagcaagcccccgctccccaggctctcggggtcgcgcgaggatgcttggcacgtaccccgtgtacatacttcccgggcacccagcatggaaataaagcacccagcgcttccctgggcccctgcg

SEQ ID NO: 334 - DNA, 1618 bp, Homo sapiens
ccacgcgtccgactagaagtcggcggtgtttccattcggtgatcagcactgaacacagaggactcaccatggagtttgggctgagctgggttttcctcgttgctcttttaagaggtgtccagtgtcaggtgcagctggtggagtctgggggaggcgtggtccagcctgggacgtccctgagactctcctgtgcagcctctggatttaccttcagttccaatgccatgcactgggtccgccaggctccaggcaagggactggagtgggtgggagttatatcatctgatggaagttataaattgtatgcagactccgtgaagggccgattcaccatctccagagacagttccaagaacacgttgtatctgcaaatgaacagcctgagagctgaggacacggctgtgtattattgtgcgaaaccctattgtcgtaataccagatgttatctatattactacggtttggacgtctggggccaagggaccacggtcaccgtctcctcagcctccaccaagggcccatcggtcttccccctggcgccctgctccaggagcacctccgagagcacagcggccctgggctgcctggtcaaggactacttccccgaaccggtgacggtgtcgtggaactcaggcgctctgaccagcggcgtgcacaccttcccggctgtcctacagtcctcaggactctactccctcagcagcgtggtgaccgtgacctccagcaacttcggcacccagacctacacctgcaacgtagatcacaagcccagcaacaccaaggtggacaagacagttgagcgcaaatgttgtgtcgagtgcccaccgtgcccagcaccacctgtggcaggaccgtcagtcttcctcttccccccaaaacccaaggacaccctcatgatctcccggacccctgaggtcacgtgcgtggtggtggacgtgagccacgaagaccccgaggtccagttcaactggtacgtggacggcatggaggtgcataatgccaagacaaagccacgggaggagcagttcaacagcacgttccgtgtggtcagcgtcctcaccgtcgtgcaccaggactggctgaacggcaaggagtacaagtgcaaggtctccaacaaaggcctcccagcccccatcgagaaaaccatctccaaaaccaaagggcagccccgagaaccacaggtgtacaccctgcccccatcccgggaggagatgaccaagaaccaggtcagcctgacctgcctggtcaaaggcttctaccccagcgacatcgccgtggagtgggagagcaatgggcagccggagaacaactacaagaccacacctcccatgctggactccgacggctccttcttcctctacagcaagctcaccgtggacaagagcaggtggcagcaggggaacgtcttctcatgctccgtgatgcatgaggctctgcacaaccactacacacagaagagcctctccctgtctccgggtaaatgagtgccacggccagcaagcccccgctccccaggctctcggggtcgcgcgaggatgcttggcacgtaccccgtgtacatacttcccgggcacccagcatggaaataaagcacccagcgcttccctgggcccctgcg

SEQ ID NO: 335 - DNA, 1978 bp, Homo sapiens
cagaaaacttgaggctgacagcatttattcagttgacatctggttagcactgtctactttccatgaatgagtaactttagggggaggcttgctgtagtccttctttactttaggtcctttttatgtaggaccctttctgtttttccaagctgtgttttcattactttctttgtgtctctgttgcatgattgcatggaagggattgggaaatggagatccttactggtttcctattgggaactgcagtgttccttttcccttacactctgtcatgtgagagctctaactgtaaagtacattagttaattggtttcattcaagaatcaaaatatatggagttacagtaagcctttcagaggtgtattcatcatccaccttaatactttttggcagctgtgcaggtagctcaaggtgtaaaaaaatcaaacaactcatcacttttgggaactttaagccattttttcaaagctgcacccttatttctgtaaagtaatctcagtttcagtctgaatgtggtactagaaaatgctctcatgatggtccttagatttcactaataactctcagcccttatgccactttcaaattattttaggttgatttagtccctacttagccttttctgatggtatgtatgtaaacagtggaaggaaacttgtttacatttttgatggggagatatatgggatcagttttatgcttaaaatatttgcattttaaaatttattgtgatattgtttgtaaatatgagattagtaatctattaataactttccttcttttgaatggatttctgtcatatttagttagcatcctattactagcattttggtacctaggctttctttttatagtttaattttgtccaaatagcattgaaataatcaactttaacagaaatcacccacttagtggtattagtatattagctcttcagatggtttgaagcaaatcaaagttgaagcaggttctatttcattcaacaagtacacaggtgaataaatcaaagccttgatgctttacaaatgtttctagagacaaatggcagagaatcttcctgaaaacaagcctgagattagaattccaggtggaaaaacaaggagggttcattaatcttagtgggatggtcttaaaaattttaaagttacctgatttacataattttattattacattttatgcatcaagattttgtttgcattgcaaatctttttgatgaagaaaatatcaacagggtttaatttttaaagtttaacccacttgttaatgcttgcaaagcactctgttcctttatcactgcagactatagtgtcccagtagtgtggtctcagaaataagagtgctgttcatttggttccctgatatgtttgcaggatggcaacttatttttatttcctgtgtttattaagaaacaactggagtgggtatatagtaccttattttaaaaatatttaaaactacaagttttacatgctcattgtaaaaaaactaaaacatagatgtaggtataaggtcacaaaaattatcttccttgtccccaatttattaccgtgactcagaattcaccctgttaatactctgcagctccttcaagataaaaaaatataattacaacaatcaatatacaaacatatacacatcagttttttttaacacttgcctttcattgaacatacattggacatttgtgtattcatgtgacatcacatctcccagtaacaaaggcatcattattagagtaacaatattaaggaacaagttactgttaactgtatcacctacagtttttcatgcattttttattgtgatttcatcctaatgggttgaacaaaatgtgtttgcttatttatttagaatagcacttcctgctaaaaatgtcataagttcaggaaagtttacaaatgtagattaatcactggatattttagctattcttttatgtaagtatatcttttctaataaaaccttagaatacatc

SEQ ID NO: 336 - DNA, 1436 bp, Homo sapiens
atttaatgagcatggttcatgatacttattttattttcgaaagacagtcctatgtgtctcacccaccggccactgcagccctggtgagggcgggtgggcgccggccggcctggaagagcgccgtggctgggccaccacctgtggctgcgttgttgctcactgaatctgttggggagaggtcaccatagtcaccgcctgacctggctgctgctcttgcttcagagccacaagcaaagtttgcactgggcccactgccgagtccagaggccggagaacggccactggtgtgggaggggagcgcacgagtgggactttgcacagcaaattgtgtccccagctcctcctctcccgcctgcctggagccggccctgaaggtttctatgaagaaataatcccccaatatttttactacgtgtgtgattttcctgttttatattgaaaaaacttttttgacactcccaagaccattcagggaaattttataaaaaatgcagatactgtcttgagcagatcgaaatgccgatgaagtggatgcaatttccttttgtgcaagcagtgcacggtgccccccctcgggtgtccgtgctgtgccttagcttccccaggtgccgggactcacacctgctaggggctgggcaaggccccggctctgctttctctgaagggcttgtccaagttcattgccctgttacaggtggtcaagacgtccggccgccttgacccaggctacccttagccaatatcctctgcccctgggtggctggtggctgggcctcagggtgggcaacgttaggggtttggcgaaagcccgccccatgggattgagggacggggctgcactccaaccgtctgcacctgctcttcccccacccctgtgggacctcatcttcacgtgccatgtgtgctgaaggcccagggcccagcagggggcagtggcacctgttgacggaaaaggccgaggtgcttaccagtggaccttctggcccgcccctcccctgtcacttgtcgggcatccagggccccgacctgtgcctagccgccagggtgacagaaggcagaactgaagcggggtctgggccacgggccagaccactgccttttgtcctcagtgaccatacattcctgctctcggacttgaactctactgtaactgttttcttgaaatgaagctgtacaggacgattcactgccatgccagtcaggcgggcttgccatgttctgtgaatctcgagtgagcggtgccacccgcccccatacctccgccaccggccgctgtcggggatgccacagcctgccacggtcgcagccagacgtgagcttggcattgaagttgcaaagcggcccctggccgggctcgccgtcgctgtccagggccgtgtccggtgctgtggctgtaaagctgtaggaccctttttaataaatagagaattattaat

SEQ ID NO: 337 - DNA, 1955 bp, Homo sapiens
agagctcagagccgttttgcagcaagtaaaaagatggatggtcatctttcaagcaagaaagataaattttatggcagcagtttttaaattgtgctggcaaagaacagctagcacagagtgatctattgataaaagaattgtggggactccttccagatttgcagtgaaacaaatggtaattgatgaatagaattctctctcccatttttttttccttgaactttggtgccttgtggagcttatttattagtgagaattctcaagtcacaaaaggaataaacttgtataagagactagtggtgaacaacctggcaatcagaggctcacacttgctgagtttcccagcctgcttttccatgcactcatgctgggggttctggtgctatgctgcaaacccatggtacacagtttttttctggttagtgtcaagctctttagtatactgatacttcagtgttttccacaaagcacactgacttcagggtgtcccttggaaaaaatgaaattgtgtaggtcacatttagctttgtgacagagtataaaataaaaagtacatcccttcctggtcagttctctggtccatcaaatgccatcacttgagttttagcaaagctccacacctctgagggagaaagttgatagaatcatgaagttttagacttggaagcagacttggatgtggtgtgagtagtccctagcctttcaggatgtgggaactgagttcacccactagctagaggttgagggagcagaaccagaattctgacttccactgactgtgaactctgtgtacccctgcactgctggtgcacaaactgggtcctgggcctgggtggccttatcagtacaagcaatgaaacgacaggtctcaacataacacgtacatgggcagaggggacgtgctgaaacgtgtaacattttttcctctgagactgtggtgctgaattggagtgaaaataaggtcatctgcagctagcttcacgtttgtgccattgctcctcaggcttaggtgtttttggaagtctttcttaaaacacattcctttcagactgtttcaacacgtatatcaacacatgtggatctctctccagtaagctttgagctgatgtttaccacatcttaccaagtttggtaaaagtgaagtgtaagaattacaataaattttccatgaggactaattgaggaataaaaatacatgggataattatgaactccatattttggacctgaatcacatttgctgcacagttattgttagtttaggtaaaggggctgggaatacaggattaagtacaaaggttataggactaggttcatgccgtcagagaacttagctgcttatagagaagctgttttaagttgtactgatgaggaaagttcactgggagctgagagagaggtgagatcattgtgtatgaaagtgtaagtagaaagatttcatttattcatccttttatttgttgtcagcaattaagcatctacaaatttgattttctaactccatgccacatattgtacaagtcatttgtatatagtggaaaacaaagtgatatgataatggtaaaaaaattgtaaaaggccatgtggtcccttcctttacggaacttttattgccacagaggaggcagatattattcaataaacactggtaaatatgaaattaaaaattacagtaggccagacatggtggcatgtgcctgtaatcccagcactttgggaggccgtggtagacagatagcttgagctcaggagttcaagaccagcctgggcaacaggcgaaaccctgtctctccaaaaagtacaaaaattagccgggcgtggtggcacacacctgtggttccagctacttcggaggctgaggtgggaagatcacctgagccaagaggtcaaggtgtggtgagccgagattgtgccactgccctctggcctgggctacagagtgagaccctgtgtcc

SEQ ID NO: 338 - DNA, 506 bp, Homo sapiens
ccagctttcaggtatcctgtgctcacagagactaacctacaaagctgatgaggtctacagcttaagaaaattttctatttggagtatacactcagttacatgaaaattgcgtatggaaaaagatgagaatgtagcactgattttgcaaaacgttttagaaagttttatttcgctgcttgtcttaaaagtaatttttctggttttatgtaatgtgtgtattagaaatgggaatattggaatacttacttcattgtattgtcaagcattattggtagccctaatttatatatccattgtgctgcagtttcagttgcagaactgccatctgcagggattattatagcacttgaggggatggaattactgcactctgttttggatacttttttcactaagaagtatgggcaccatgagatggtacttacccatctgtctgttgaagcatttgtatgtatattacctgagcacttaggcacaccaccgaggggggatttcaaatggaaggg

SEQ ID NO: 339 - DNA, 2543 bp, Homo sapiens
attttttttataaatagagacagggtctcactatgatgcccaggctggtcttgaactgctgagctcaaacgatcctcccgcctcggcacccaaagtgctaggactacaggcatgaaccaccgccatgcccagctaattttttttttttttaatttttagtagagacgaggtcttgccatgtggccctggctggtctcgaactccagagctcaaatgatccacccaccttggcctcccaagtgccattatatatcattaaaagattcaaaaagtgactcccaagcagggcagagttatgccactgaaattcttacactaaggaataaagtctatgaaatgcaaaataaatagaatctgtgaaatgcaagaaagctggaaaacatgaaataaatacctttgggcactatctcatacactggggcaacaagcaacatttaattatgaatagctgaaaattgaaggggaagcagaatgcagactaagctaggaggtaaagtaaaggttgagtcaacaatgaggaaggcactgaacaaacacacagaggaattaaaaaatgttaaaggtggtatactaggatggatgacacaaactcttgcgctgacattcccagatctgtcttggaactaatttccaaactcaggaaactgaattaaaatttttctttaaattttaattgtctttactcaaattccttacttgaattcttatgagatccctgtccatcttagaggctgaccaagcccagccatgggtggtccaaattgcttaggtggtcccaattgcttggctggcccaagagatgtctggttcttaacaatacaagagcctatagaaattgctaaagggatttcagccacaactgaagctcaccaagaatgagttttctggaactggttaaagtgtcacagtagggagtaaggaaataagaatccccaccaaacataagagaacagaatgataatagtccctactagtccatgacaaggctgccaattaggcatttaaagctatcaaagatgatgctgtgagggacctggcaacttttgtaatagtctgactttaaatgttttattaatggccaagcagcaaatattttaggatttgtaggctatatggtctctgtcccaattactccattctgctactgtagcataaaagcagcgatacatgacacacataagaatgagtatgaggccgggtgcggtggctcatgcctgtaatcccagcactttggaaggccaaggcaggtggatcacccgaggtcaggagttcgagaccagcctgaccgacatggagaaaccctgtctctactaaaaatacaaaattagccgggcgtggtggcgcatgcctctaatcccagctacttgggaggccgaggcaggagaatcacttgaacccgggaggcggaggttgcggtgagccaagatcacaccattgcactccagcatggccaacaagagcaaaactccgtctcaaaataaaaaaaaaaatgaatgaatgtgactgtgttccaataaaactttatttatggacactgacacttgaatttcttgtaattttgatgtaattaagttttataattctgattttttttcaacaattaaaaaatgtaaacaacagtctttgctcacagactgtataaaaacaagcggttggccagatttggctcttgggccagtttgctggaccctgatatagagaactgggaggctgcatcaaagatagtcctttaacttacttttgtttgaagatgctgtattttaatattctcaaggatattctgatgtccccaaggatattcagtgtaaactgcctacttagtgaaatattgttgctctatttttcttaccattttatccactttaagtatatacagttcagtagtattaagtatattcacatttttgtgcaaccaatctccagaactttttcatcttgcaaaactgaaactctattcccattaaacaatgacccttttccccctcccccggcccctggcaacaaccctgacacaccctggcaactactttctgtttctattaatttggctcatgcttcaggctaccccataccatcattctgggacacaagaactagacagcaatttgtgttactatctagactggcaggggtgaatacattagagattccatacatgaaaattgtaatatgttaaggggctctagtttaaaaatatgtaaatagccaggcgtggtggctcacccctataatcccagcactttgggaggccaaggcaggcggatcacttgaccagcctggccaacatggtgaaacctcccatctatacaaaaatacaaaaattagccaggcatgatgtcgggtgcctgcaatcccagctactcaggaggccgaggcaggagaatcgcttgaacccaggaggcggaggttgcagtgagccgagatcgtgccactgcactccagcttgggcgacagagcaagactccgtctcaaaaaaaaaaaaattatgtaaataatattaaatttaagtaatatataaatatgaagaaatgcctgtctgcctg

SEQ ID NO: 340 - DNA, 1454 bp, Homo sapiens
ctttggtcttattttgtttttctttttgtagttcatttatttgtaactttaggttatttgtttgagattttcttctttttaaatgtaggcatttgttgctataaacttacctctgaaaactgcttttgctgcatcctttatgttttggtatgttgtgtccattctcatgtgtttcaagatgtcttctaatttccctaatttcccctttccttctaatttcccttttaatttcttttttgaccaattagttgttcatgagcatgttaatttttatgtatttgcaaattttgtggaattctcctgttactgatttctagtttcatatctactttaatcttgtctggctactacaacaaaatatcttagattgggtaatttttttatttctcacaattgtggaggctaagaagtccaagatcaaggtgccagcagatttggtgtctggtgagggccattcctcatagattacaccttctttgtgtcttcacatagtggaagtgatgaatgctgtatcctcacatggcagaagggcaagagactctagggtgcttccttcagtctctttcatgagaccattaatcttattcatgaaagtggatcactcatgactttccaaaaggccccacctcttgataatatcacattatgcattaggttccaacatttgaatctcggaaagacgtatacacttaaaccatagcaataccattgtggttagaaaaggtacttgatatgatttcattatttttaaatttggtaaaacttttttttttttttttaattttttttttattatactttgggttttggggaacatgtgcccattgtgcaggttagttacatatgtatacgtgtgccatgctggcgtgctgcacccactagcgtgtcatctatcattgggtatatctcccaatgctatccctcccccctcccccgaccccaccacggtccccagagtgtgatgttccccttcctgtgaacatgtgatctcattgttcaattcccacctatgagtgagaatatgcggtgtttggttttttgttcttgcgatagtttactgagaatgatggtttccaatttcatccatgtccctacaaaggacatgaactcatcattttttatggctgcatagtattccatggtgtatatgtgccacattttcttaatccagtctatctttgttggacatttgggttggttccaagtctttgctattgtgaataatgccgcaataaacatacgtgtgcatgtgtctttatagcagcatgatcagagtgaacaggcaacctacaacatgggagaaaattttcgcaacctactcatcggacaaagggctaatatccagaatctacaatgaactcaaacaaatttacaagaaaaaaacaaacaaccccatcaaaaagtgggcaaaggacatgaacagacacttctcaaaagaagacatttatgcagcc

SEQ ID NO: 341 - DNA, 1399 bp, Homo sapiens
tgaggctcttgtatagaatttataagatgaataatacatttttaagatttcttctgggaacactgaaattcttattttaaaatgacagttgataaagttttataaaagtttttatttgtagttgtatttattatttatttaacggaggcatgcacgtttggggaaaccttattaggtaattgactagaatttttttaatgtacctttattcgtctatatatatagtcagttaattgtgtcgacatgaattaatacaaaatatgattgcaaagaaagcactggatgctttgggaaaaaggagaaaagagctgttaagctgccaaaatagaaatgttttacttgcaacattttgcattttcttttcacaggcccagtgcttttacaacagaggaatgctaagggagaattgcccttggattatgtggtttcacctcaaatcaaagaagaactgtttgctattacaaaaatagaagatacagtggagaactttcatgcacaagcagagaaacattttcattaccagcaacttgaatttggctcctttttacttagtaggatgttgctaaatttttgttcaatttttgatttatcttcagagttcattttagcttccaaagggttaactcatctaaatgaactgcttatggcttgtaaaagtcataaagaaaccaccagtgttcatactgactggttactggatctttatgctggaaatataaagacattgcagaaactcccacacattcttaaggaactgcctgagaatttgaaagtgtgtcctggggtacacactgaggccttgatgataacattggaaatgatgtgtcggtcagtcatggagttttcatgatgatgctagaaagtatggattgactttctaaatctgttcagtttgcattggtacttactgtggacttcatagcttactgacagatagtaatttgatttatttattgacagactttgcagccttgctaaattttaaaagcatttttaaaaaaacttctacaaaactctagtatgggcttctgactttttccagggtgtagaatttgactcaaaagtaaaaataattttgttttagtatattctactttcattaatgtttttttgttctgaaagtgatattatattgtacatgtaaaattaatttaaatattttttcaaataaaaatgtaatgtcctgtattctagatgttctaggtcttagaatcatggcaagcatattcatacaaatgcgtacctataaacttgtagctcctgactcttagggatggattttgaggaaaaaacaagactaaacaaaaacatgtagctccctatttcttctctctaggttgttggactgaaatatgcattttagctttgtgtgtttctaaaataaacatttctaaaattt

SEQ ID NO: 342 - DNA, 1755 bp, Homo sapiens
  misc_feature 294,312: n = a,t,g, or c
ttttttttttttttttttttttttttttgggacggagtctcactctttcacccaggccggactgcagtggcaccatctcagctcactgcaagctccgcctcccaggtccacgccattctcctgcctcagcctcccgaggagctgggaccacgggcgcccgccaccgcacctggctaatttcttgtagttttagtagagacggggtttcaccgcgttagccaggatagtctcgatctcctgaccccgtgatccacccacctcggcctcccaaagcgctgggatcacaggtgtganccaccgtgcccggcccancctgtgattttacaggtggctggagcatggagtgtctgagggcctctagtgcctggggcaggatagagagggagagaatggtcagataagagggccactctgccagatgaggaaagaggggaagggcaggaagaggaaccaagtcgtcagagccgggagagccaggagggctgatgggcctagccagacacagctgaccccagtgaggggaagtggcctggggtcttagttcagcctgagtggcctggcaggctgaagcctgcactggcccccaaaggggaaattgtagacatgacccatcttctccccaacccatcctcatctgacctcagcagcaacccgggcgatctctgatacagaccagcctggggaaggacagcttcgtgggtcctccccaaggtcctctctgcactgctgtgtgtccttgaagaggacgcttaacctctctgtgctgtagttttctcttctataaaatggacccaggatgggtgcggtggctcacgcctataatcccagcaccttgagaggccgaggtgggaggatcacctgaggttgggagttcgagacgagcgtgcccaacgcggcaaaaccttgtctccactaaaaatacaaaaatcagccaggcgcctgtaatcccagctactcaagaggctgaggcaggagaaccgctcgaacccagaaggtggaggttgcagtgagttgagatcgcgccacttgcactccagcctgggtgcaacagagcaagactttgtctcaaaaaaaaatagacccagtgggccgggcacggtggctcatgcctgcaatttcagcactttgggaggccgaggcaggtggatcacaaggtcaggagttcaagaccagcctggccaagatggtgaaacccccatctctactaaaaatacaaaaattagcaggcttggtggtgggtgcctataatcccagctactcgagaggatgaggcagagaattggaattgcttgaacctgggagacggaggttgcagtaagccaaagtcgtaccactgcactccagcctgggcgacagagcaagactcaatctcaaaaaaaaaaaaaaaaaaaaattggacccagtgataggactaacctcagccagcgtgtgttgaaaggataagatgaagtaattcacataaaaagcttagaccaggcttggcctggtgcttacgcctgtaatcccagcactttcataggctgaagcaagaggatcacttgaaattcaggagttcaagaccagcctaggcaacatagcgagactccatctctgtttgtaaacatatattatttaatatatatattaaaataaataaaggccagttatggtggctcatgcttgtaatcccagcactttgggaggccaaggcgggcgggtaacgaggtcaggagatcaagaccatcctggccaacacggtgaaacctcgtctccact

SEQ ID NO: 343 - DNA, 2102 bp, Homo sapiens
  misc_feature 1021,1147,1173: n = a,t,g, or c
gagagtttgaacaaagactcagaaatggtttttaaaataacagtcccatgtggcccacatagaaaatattgggatattttaaggtgtggcttcacttttccatatttaaacacttgtttctacttggtgaaatacacaggtgacaagtcaacttcaggaataatggtttttttttttaagaagatgggagttgggaatttcttatattttcctctcacttcttaaaaccacctttgtgcccctgctttacattaggaaaaatggaaaggtgattaaacacggccgttaggagcctaaaatctaggtcagagtcccgtatgaaagaaatcagataagttgagagagggcgtgtgcaggttggaaatggtggcgtccatctctgctgggacgtcgatgccacctggctggacaggtggagcctggaaggtagggaggctcggagcatgttcggagaggcagggatgtttttgactgtgggtaacactgcatgctgggaacggaaatgagcactgtgtgcccagcagggctcagactgccatgtggggtccctggagaagaaatcacgctaacactgagtatcaaaaggatgggtggtcctgggttctgctctggcagccctgctaagggcagagtctcccggtggtcctgggtcctgctctggcgccctgctaagggcagagtctcccagcctctcaggagcttcagtccacttaggaaacttgaggtgagctgcagggagcctgtggagaaacgcttctcatttagtggggtgaggtgacacggggtggcggggacagtaagttaagtttgagaaggaagtatgtagaaagtgtatgtgaaatctgtagatttggggcctctactccattgtgaacttaaagaggcagggcgaaagcgagggtgagaattttactcaggacatgaagaaggaagtcctttgagaaaacctacccccggatctcagatgacatgtcctcccagtagttttgggggttttgtgggtatgggttcgctgtggttntcttttttaagcagttgcatattacatctcattcgatttagttatgggaatgtttaatgttctacatgaagccactttcacttgtaggaatccagacgctctgcagtgtcccatcgtcttatgcgnatggcgggtaaaggcctccattcgancttttgtgcccaagaatgaacggcttcattatctcagaataatggggctgaaggtattggcagaatagaagaaggaaggggttatcctcacaaatgagagtgcagccagcaccggacagccagacaatgacgtgactgagggacagagagcaggagagcccaacagcccagatgcagaagaggccatcagtccagacgtgacagcaggctgtgacccggcgggggtccatccaccccggtgagcaggcccaaggcagcgggggcccacacccctcacacggcaaaactggcttcttctggtcactggtgtctgaaaccaaatccagagcagcctgtggcctgtaaagcatatatttctaatgactgcagactggtgggatcataggagccttctgaatgaccaggactgctttctttggagctgatgaaaatgtactcttttagcgtgttagaaatcacttgttttattttgtttctttggccaagctgggtctagtgtttcttttgctgggaatagactttcaaaagttgtacttctatcaagaaacaaaactgcccttgcagaaatttcaggtcttttgttaagcctgtattggtcttaaggtgcagtattttttaaattattatttatagaaagaatctataaattcttggggaagtgtgttataagctttaataattacattgagctgcacctcagtggtgtgtcattaacatgcagtggggttaatatctgaggcctcagatgactttgtgccttttggaataaagggtaaaataaactctcccagagtaagagctgtatcgtgaattgtcatactaattattgagggggacttatgtgcttttattgaatggagtgctttacaatttttatttttaaatggggttgggatccttggaatatttcaataaaattgataaaatat

SEQ ID NO: 344 - DNA, 2890 bp, Homo sapiens
aatagattctatcttccactgggggagaaacttaatttaactaagacagcacatttctgagagtgtactgatttgaagtaaaacaacacactccaggcaattcactcccagttggattggcttccttggttttgcggtctctgcaccctgtctttactagaaaaggcaagatgccctctctttgagtaatgtcaaattgtacacagaattgcgcctgcttccagtaagccattggggtcactgcagttacaggaacaggtccttatgcctcagacatgtaaataaatagctctttagtatttcagaggcttatcaattatgagtgcccaaccacagtgcaactgggcaattgactatgcatcttggctcgcagattagtctttctttgacttgctgtagctgtgggatggtctcaattgtccctcaccctcctcacaaacattgcccttttcttccattactctatgctggctttgcataagaaagaagaaataatatttgactgtcaataaatctctcagtgagcagtgctattaaggggcaaagtatttttacatttcagagttggtgcttaggtcaccaacctatcccctctggtatcaagcagtctacctggcaagagagttagaaaatagccttcaccaagggacttagattttgtcttctcacttttgaaaagatgaatatgtatgagcatctctccagagcctctgaaaggatcgctgggtggagggtggaaacccagtcactgaagtccccatggagaaaagataaagagttggactgaacagctgcttgaatggatgcattaaactgacattaaaatcaccaacgtgtttgagaaatccactaataacacctagcaaggctcaggggcagaatcgatttagggagtccaggaaattccacacctggtttggtgcaggtaaaccccaaagtcattaagaagaattagttaagcccccttgttcctcctacatttattttcactgatcctatttagttccttcttcaatttgctaagacacaggtgtatactgatctcagcagctcgtgaatattttaaaactaaagtttcttgcaaaggaatttaacaaacaaaagtctcaactcactaccttaaatttatattctctgagcccttaagctcaaggaagcatttggaattgctttgacttagagaaaaggtagaaatattgtagtctatgagtgcgctacctttcaagaccattgttggtttagtatggcaatatatatcattcatgtgacagatattcattgagcatatactatgtgttaagactctgcttggtgagggagaatatagctatgaagaagacaaatgtgtccctagtccttatagagcttataatcttatgggaagatgaaggtacataagaggcataagcaggcaattttaaaatgtagaagtaaatgtgacttttgaagacaaagaccacttccatgataacttttaatcctatacttcttcccatgctaattgaatcctacacagataccatggagatgttttatgaactgtgtgattgatggcagaacatattcattaattttgtccatggcacttgattgggtgtcataatgaatgcggaaatagaatccaaaggaactttaatatattgaagaaatgtttttcaaagtcagaatgaggttccgcaaggacaagctggggttttgcagaaaggcacacatacatgtgcaggattccagcatcttttctcacgggtgctgtttttacttaagcaatggcctccaatgagcatttattgaaccgctgctacctgccatgcacaatacaggaggagacttctatggattagaataatggtggtcaatgctagggtgatgctgaatatggaaacagtcagagttttactaaaggccaaagagtattaaatttgaagttactagcattttcccccatgagtatcctcctccctgtagcaatggaattcaataagtatatattaagcacctactacatgcaaaactcatgcactctggaatccgacaacttactaggagaaaattgcacagatttaattttgtaccagaaagaagtaaatcaatgttataaaagtggaacagttaataattctactggagtagaaaggaaacagggattgatactaatcatgaaaggctacgtgaaggagttgacatccgagctgcaccttaagtgtctcagcatgtaaagcagtgaattccatgctggaagccagctgaacaaaaccacagacacaagcaagtggggagagattcaggggcattacgtatgtgtccctggagcaaggttctgaagggaaaatgtggggatgaagctgaaaaggtaaggtgggactaggtcattagcatagattttgaatttcattctataggcaatacgaaattttcaaaggatcttgaggaagaggcttttgtgttttataaacttgctatatgggcaaagtgaaggacgtatcggagatggaaagggcttggtatcagggggtagttgtgaggttattataactcattctaacttcattatcctgagaagatgtggcctgaagtaaagtgatagtgataaatgtagaaaactgaagcagccgggcgcagtggctcatgcctgtaatcccagcactttgggaggccaaggtgggcagatcacatggggtcaggaattcgagaccagtcagaccaacatggagaaaccccatatcttctaaaaatacaaaattagctgggtgtgttggtgcatgcttgtaatcccagctactcaggaggctgaggcaggagaattgcttgagcctgggaggcggaggttgcagtgagccgagattgcacctattgcactccagcctgggcaaccagagtgaaactccatctt

SEQ ID NO: 345 - DNA, 1604 bp, Homo sapiens
  misc_feature 1460,1461: n = a,t,g, or c
gccataataaacataaatataaaactatttaaacaaaaataggtgcttttagacatccaccttatcggaatttatggcagaccagattaatgaccatgcaccagtaaggactgtgtcatcagtcataaaaacaatagagagggttggaaataaaagagcagcactttgaacattattcctgaaatttccaaatagtgaatcataattaaatgattatgaattttctttggagattcccataaagccacaaggagaaaggttttttccaaggcagcgccagtgtagaaattcaagttctagtgcctgacctgctttaagccaggctaccatgtcagtgccgtcatgaccaccctttaagtcagtgcctcagacatctttaaggcctaacccctaccatggatgtgcttgtggggaactgcccctctcattcctgctgtcattctcaccctctgtctaacccttttctctcaatttaacaaaccttgattcacttcttgtgaatcatttgtttaatggttggatgatcagggcctttaacacagtaggagaagtatgatctttgaagttagaaagactccctttgctgtgtggctttgctcaagttacttaatttctctgcacctctctttgttcatttgtaaagtggggatcgtatataattcattgagctgctctgggatttaaataagaaaaggaataaactattttttggttgatttaacagttgaaataaacagtacttatttccaactctgaatttttgaaagagtttaaattcatgaatttggtaggcactgggccttaattccacaaacattaaatgtggtgcaaagcaccatactgagtgagcactggggataaatatgaatggtgtggttcctgtcctcaaagagaagaggcaaatgagtaatctattaagtcacctgcagggcagtgatgagggctgtgggagatatactaagaagggctatgataacacagcaggaggacaggccaatcttcttttatttttttatttttgagatgtagtcttgctctgtcacccaggctggagtgcagtggtgtgatcttggctcactgcaagctccacctcctgggttcacgccattctcccgcctcagcctcccgagtagctgggactacaggcgcctgccaccacgcccgtctaattttgtgtatttttagtagagacgggatttcaccgtgttagccaggatggtctcgatctcctgaccttgtgatctgcccgcctcggcctcccaaagtgctgggattacaggcgtgagccactgcgcctggaggacaggccaatcttgatcaggccttggaaagagtaaatcttaaaagataaagataatttcaagaccttgactggcctgctaaggagtgtggaccttattgtaaaggtgctaggaaggacctagacccatgagctccaaattttttgttctttatggggnngggggggaattgagatctctctacagtgaagaaattggaagaaggagatattagagcaaattcactgagctctgtgccttccagacagttactgtggacaatataataagttatgaaaatcaaacacacagaagttttagagg

SEQ ID NO: 346 - DNA, 1974 bp, Homo sapiens
ctcgccaaaggaataaaaacctggagtgtcagtctctatagtctgtgtgagcagcactcccatcctacaaagaattccattgccttgtaattatgatttgcgatagggtacaatatgtacccagatatcaagtccacgttgtcgtctctcttccccctgcaacaccgcaggtggtgtacttcaaggagatttttggggcagttccccaaattcaagtgccattgccttgccctgaacttgcttcagatcagtatgctggtaacatgtcaggcaagtcctggaggcatcctttagcttggtccttcctaacaggctgtcctgattgagcattcagaaacactttacagtattatttatcagtacatactgttaaggtacatcaagaaatatagagattcattgtttttagattgagcaaatcagttcagttctcttcaggcatctccgtttagcagctgcttgtcatgcttacacatactttgagacccatgctctgcccttttgtatcttgctggaaattattaagggctttcaatggagatttttttgttttggtatagaagtgcttaactatgaaaagaaaaacgtgcaatttggggttgaaaaatagctctctttcaaaaagggagaactgtaaccccaataactatgcctaccaacccattaaaggagaaagtaaattcctcagtaaagttccttttatagactgtgacctgtttctgtaccctaatgttttatataattatttactaaaccattccaggtgacttaattacaattgttgttttacatacatatatatacctatctctttatgtatctgtgaatacttactctattacagttcctagaaaacaaaatgccttaagcattgcatagttacaactcacttggcttgcttacttccttttaaaggagggaatgctttagggagggggaagatgcaggatggtttttaacccctatgtgctattcattcattggacatcttataatgtaattgtgttaaaactgcctggaaaattcctaacagttcttagctttttatttgaagaaattttggagtgatgaaaatatagtttatttagggaaattcaaaagaaagggttaacatgaatccagcaaaacaactttatccatagtgggtaaaaaaaccaaatctgctctgcaacctgaccctacttcagagttttctcctagttccttttccctactgttactttcccagtccttgctcctaccctccttgtctaatgaacgtgattgaattaccatttagaatgtccttctcctccaacctcaaccactatggcatgacccatgtagctagtgtcagcgatgtactgttggacaactcattcactccaccttgtcagcggatgggcggaatggtctcttttcggacttttgaagattttgtcaggtaagacattgtggaactatgtctgtacaaggggagccatggacatctgtgttttggggtctcatctttctgcaaaatgaataaaggtctcccgaatagccatgagccagctaaaaagatgtaacccttgctgtatatgccgttggagaggtatatatccttgcatttctacctctcattcagattctacaagcctctacttgtagtatgggcctggtcgagaaaaaaagaaacaaacaaaacccatcttttcctgtggagctaacagaagaagctgtctgctctgtgatgagtgaaatgtcaggagaaattaaacataacactagagtgagccccacaagagacaatacatcttttgattaaatgcattcagcatctatctcttgatgtatactgatgcattaccctagggggaggggtaattacattggtctgtcactactccagttccagacactttctgttactttaagaccgatgatgacagaagtgctcatatcttacatatgaggaaaacaaaacaaacaaaaaagctttagatcattctttct

SEQ ID NO: 347 - DNA, 1683 bp, Homo sapiens
gtccatccttaccccacccctactgattatgatgtcactgctgtcacatattgtcatacgtggggggctgttactgggttctccagtctcctccctttatctgtttgtgtatccctgtgctggtgccacactgcctcgttcactgatgtttttaataagcctgcaccatttgtatgtcaattcttcctgctcttcttatccatcaaaaatcactttaacttttcttgttcctttactcttccatataaattgtttattcaaccatcaggttccaggaaaaagcctgttagtattttcattggacttacatggaatttgtagattttgaaaaaacagatatttttatgagtcttcctattcataaaaatagtatgtctccatttacttatgtctttaagtgtatttcagtaaagctttctatcttttccacattggtcagctcctctttttattagaattattccctagcatttcatattttctgttgctgttgtaaagggtaattttacatttttatctattactgatataaagaattgtaatttatttcacatattgatctagtattaagcagcatgctgaattacttaattctatatgactataaactttgcagggacttgctgttgcccaggctggagtgcagtggcgtgatcatggctcaccactgcctcgacctcctgggcccaggcaatgattctcctgtctcagccctctgagtggctgggaccacaggcctgtgccaccactcctgactaatttttctgtactttttgtagagatggggttttgccatgttgcccaggctagtcttgagctcttgggttcaagccatctgcctgcctggtcttcccaaagagctgggatgacaggtgtgagccaccacacctgtcttgttgaattttctataaacagtcatacaatttgcaaaagaaaacaaaaactttagttccttgtgtggttcctaaggcctccaataaaacaaagtgacaatagcagccatccttgtctcattccttagaaggaatgcttcacacatttctccactaaatgtgtgcgttgtaggttttctgatacataattttttctttttttttttttttagtcttgctctgtcgcccaggctggagtgcagtggcgcaaccttggctcactgcagcccttgcctcccaggttcaagcgattctcctgcctcggcctcccaggtagctgggactacaggtgcgtgtcaccacacccagataattttttgtatttttagtagcgatagggtttcaccgtgttggccaggagggtctcgatctcctgacctcacgatccacccacctcgggctcccaaggtgctggaattacaggcatgagccactgcacccagcttttttttaattattatttgaagaatttaagattggaattaattgctccttgaatgtttggtagactcatctgtaataccatttgagcctagaatattctggtttttttgagacggagtcttgccctgttgcccaggccggagtgcagtgggattacacgcgtgagccaccatgcctggccagaatattctttattgtaaaatttaaagctgtaatttcaatgtcttgaagagttatagatctaattagattttccatttctcctggagtcaatttggtacaaacagtcaataaagactacaagacc

SEQ ID NO: 348 - DNA, 1684 bp, Homo sapiens
gttcattagggaaattatcttcccagtccaagcaagcaataatgttatcaacttacaatattggacaatcttcatattctatgagatgcctttaaaatttctttggatttaatgctgctcttggtcagttgttcaaatgaaacattgtaatttcatgttaacgacaagagtctcacgggagtctctttagatgctgcaggaactgagaggatagaagacctctctatacatctacattgcccattggagtaaagcactttacagagagatggatgccgctttgggatttggggtctatgtaatgctgatttttttcaaacctgtttggaaatattacttctttgggatggctgaaataacttttgacctgacacatctttctgtacttcctgtggccaaaaaagcaagtgagactttctgtttcccattgtaaggctggagctgaaatagtctgccacgttattgttatctcctttgtaagaatttgactttctgaatgaaataacagaatgccagtgtcaacactgaccatatgatatagttatttcacttagagatgcttcctcaaagagcgtgcctttttcctccatcataaccgctttaggatctctgttttatccatgtatttcccacatagtagaagcattttccatttccatgaatattacaggctgagaaggagcacacatctggcactgataagcacactggcccaggcactcagccttctcatttcattaatctggttggtgaccgtttccatcgggcacacctggaaatgtccatcggacatattgccatctcagttgctgcagtgcagtgaattaccccagagccaccagttcacatgcccaaagatgaactggcccatggagggacttgatcgccaagtgacttcctttctgtagttatcctctgctgtgacccttattttggacttctagcaagggcattcagtgtggattccaagaacaaaaccaattgtccaacctccattacaggggtcttctaggtattccccacacattatttgtgggcataagcaaacgccataactatgaaaggctgagagtggagaattaaagtcataaggaaatgatcaaacctagggaaaaataagtggctataaaacactgaaagatagtcacatccacatagcgtgtatcatgcaacagacccgtgctcttagagggaggtagtgtgtgtcttcccatggcaaataatttttacaatactgctcatgtttaatgtgtgtctacagggcatgctgttgtctcaaaaattgaaatgtgcatcttaggtatcagttcccagcctcggactcttctcaggcaggtggaccggatctcggctgcagaacatagtgagtggccaaacctacacagcccagccagtagtgtgctttggggtgattgcaaggcagcaaacagtggggacaagttttgtctggcatttgaaaaggtgttatcccttactttccacatttctgaattggattcttgttccctggtaaacaccagatattataaacagagcatgctgttatgacattgtgcttctatatacctttttgtataatgtatctatctcattatattacctatggtttcagtatgatctgttgtgtatgttccaccgtatatttaatgtctctgtaaaggcacttccaaacattttgaaaacg

SEQ ID NO: 349 - DNA, 1514 bp, Homo sapiens
agaagactggagtggtgtttggtgccagcctattcctgctgctttcattgacagtattcagcattgtgagcgtaacagcctacattgccttggccctgctctctgtgaccatcagctttaggatatacaagggtgtgatccaagctatccagaaatcagatgaaggccacccattcagggcatatctggaatctgaagttgctatatctgaggagttggttcagaagtacagtaattctgctcttggtcatgtgaactgcacgataaaggaactcaggcgcctcttcttagttgatgatttagttgattctctgaagtttgcagtgttgatgtgggtatttacctatgttggtgccttgtttaatggtctgacactactgattttggctctcatttcactcttcagtgttcctgttatttatgaacggcatcaggcacagatagatcattatctaggacttgcaaataagaatgttaaagatgctatggctaaaatccaagcaaaaatccctggattgaagcgcaaagctgaatgaaaacgcccaaaataattagtaggagttcatctttaaaggggatattcatttgattatacgggggagggtcagggaagaacgaaccttgacgttgcagtgcagtttcacagatcgttgttagatctttatttttagccatgcactgttgtgaggaaaaattacctgtcttgactgccatgtgttcatcatcttaagtattgtaagctgctatgtatggatttaaaccgtaatcatatctttttcctatctatctgaggcactggtggaataaaaaacctgtatattttactttgttgcagatagtcttgccgcatcttggcaagttgcagagatggtggagctagaaaaaaaaaaaaaaaagcccttttcagtttgtgcactgtgtatggtccgtgtagattgatgcagattttctgaaatgaaatgtttgtttagacgagatcataccggtaaagcaggaatgacaaagcttgcttttctggtatgttctaggtgtattgtgacttttactgttatattaattgccaatataagtaaatatagattatatatgtatagtgtttcacaaagcttagacctttaccttccagccaccccacagtgcttgatatttcagagtcagtcattggttatacatgtgtagttccaaagcacataagctagaagaagaaatatttctaggagcactaccatctgttttcaacatgaaatgccacacacatagaactccaacatcaatttcattgcacagactgactgtagttaattttgtcacagaatctatggactgaatctaatgcttccaaaaatgttgtttgtttgcaaatatcaaacattgttatgcaagaaattattaattataaaatgaagatttataccattgtggtttaagctgtactgaactaaatctgtggaatgcattgtgaactgtaaaagcaaagtatcaataaagcttatagacgtaaaaaaacttagaaa

SEQ ID NO: 350 - DNA, 1741 bp, Homo sapiens
ttttttttttttttttttttttttttgacgcacacagtctggtttattggctcatcatacacacacacatcaaatatgtacacaaacataaatattccaatgtacaaagtttacatgggactcacagatcacccctcgtctctttcatccagcacccccaacttggtgccgtcctcttcctgtttcaggatgaaggcgtgtgaggggctggcactaggaggcagggatctggaggagggagaggtcctgctcccctctcctcacaggcacctccgaagggtcctgtcccttttcaatggcaccttagggcagagggctaaatccctcatccctctctgctgcagctcaaatccccaactctccttgatccctttgactctcctccctaatttccttggcttcgtcctctcagcatgtccctgcttctccatctctgtgtctgttcccacagtgcctgcagggaggagggtctttgggccatggagtccttctggcccctctgccctcttcctgggccttataggaggctaggactacggtgcagctcagcagaggggttggtgccattggcaggctctctgttgggggtaggcgctaagccacagccctccccagggcagccatgctggatcaagatgtctgcacactcctggctgccggcccggcgagcatatgccagtggagtcaggccccgggcgtcccggctcctcacgtccaccccgtaccagatgagcagctgcgtgaagacaacgttggccatggcactggagagatgtagagccgtccgcccgtccccgtccccataggtctcattcacctcctctttggagccatgtgccaggagcatcaccaacagccgcaggtcatcttccaccacggcccggagcagctgctgccccagtggcacatctgagcttggcagtggggccaggaagagcttctgttcatacttggcccgtatccagcgttccttctcctctctgcaggcatcaggccctggcttggagtagccacccaaggccccctcccagacgctgttggcgagggcattgcccatggcagtcatgacagccagcagctcaggcggccagtcatcgaggtcaagggagcgcacccgggacaggtgagcccccaggtgtcggtggatgcctgagcactcaatgcacatcagggcacccaggttcaggctggcccagtctggattgggtgcatcgcagtcgatacaaaagctgttgccgcggacggtgcggacggcctgcacagccagagctgcgttctggttccccagtcgagtcttgtccttggcactgcggcagccttgcaggctggcaaggatctgggcctgcacactctgaacccacagctcccgctcctccgccgttgaagcctcgaagtgccacgtctgcccagtgagggacaccaccacaaattcaaacgactcctctgcctctgtgcccccacccagctgtgtgttactccgctccacggacagcccgttggcacgggggctggtgcccggggctgtggcaggtgtggctcggggcaggcgcttccctggcactttcaccgttgtccgcagcaggtcaatctccttgccgtggatgttctgcatgtaatcatgcaggctggggtgataggtgagcagcccgttgtcacagagcgtcacatacttcttcttccactccttgttcagggacttgccgctccgctttagcaggatcccctgcttgatggggatggc

SEQ ID NO: 351 - DNA, 2299 bp, Homo sapiens
cccagctccgctgccacgcccagtgctccccggcctcaccggcccccgacctggcccccagaactacctcctgcgagaagctcacggctgccccctcagcctccctgctgcagggccagagccagatccgcatgtgcaagcccccgggggaccggcttcggcagacagaaaaccgcgccacgcgctgcaaggtggaacggctgcagctgcttctgcagcagaaacggctccgtagaaaggcccggcgggacgcgcggggtccgtaccactggtcacccagccgcaaggccggccgcagcgacagcagtagcagcgggggcggcggcagccccagcgaggcctccggcttgggcctcgacttcgaggactccgtgtggaagccagaagtcaaccctgacatcaagtcagagttcgtggtggcttaggatcttcggatcggccaccctcgcccctcgcaccccagcccagggcggcggggactccgagagccccggagagaacgtggcccagccctggagggcaggcggccactcccccagccagaagtctttttttcttttcttcttttttattatttttttctttttttaaaaagttctgaccgtggtttcctggactcttcatgggctttgcttcctacctccttcacccttcactcctgccctcctcttcctcctcctcctcctcctcctctgtctgtctcctttcacctctgcgccaggtcggtcctccctgccaaccttccccagctccaatatgtagcagtctctctggatggcggagagtgaaggagacggagaaacgcgccccatcccttccgccgcctcctttcccccccgaccctattcaggttttaagtcaaaaatgtcgatatgtcattatgcactttacagatgaggggaggggccgcagtgcgcagaacccaccccaccccccagtgcagacttcggggtctccaccccaggccagcagcgcccactgggctacagcaagccaacaggtcacagaagccaacgaggggactgtttctcttccactcctatcctcttttcttgatctttttttttgcattttccttcatttctttaacaaggagagcaaagctgttttagcagaggctggggctgaggtccccatggggtttgggtgcaggggcatggcaccctttcctgtcgggaagggagaggggaactacccccccagcctgccctccgccccgccccagccggcggactgtgctgtttcctccgcccccactcccgtgttttctgacctcctgcctgagtttggggtatttatagactattaattttctgactgagccaatagtggttggggaactcttgaaaaaggggagagaatggctgggtgctggggagttcccccctccgagccctccttcccggcccaacctgagggatgtggatttgggactgtctgggggcccctcctgcagcgaggatgggagggggtgctgagctgtgaatcccctgggcagggggcgacaactccgtgtagcattaacccccgtggcggggtccgctgctggtctaatttggaccccctgcctctcagtgcccctgccctaggggtgtctgtctccagaggggagggacaaatcccctactggggccatttcaatggggtagtttttggatttttttccccactcactttttattttttaatgataatggagatgtctggacccttcctcaccccacctgtcggtcttgtcctggctctgcctgtcccccaccgttgttctcgtaggtgaaccccaggtcctcaactccccccctttatgtgttgaaagttaatggtttcagatgtgaacatcacgtgttataactgtagcgctgtaaatttttttgtgggagggtgggcagggaggggtcccagagggtagagctcaaggattttgggttttgttttgttttcatttttccaaaaaaaaaagaaaaaaaaatagaaaaaaaaggagtaaaaggggcgggtttgttttttgaagaactgtcttggatacctatttaaatgtgtgttctgttttgttttttaacgatttttaaataacgtctgtgcctccactggttgagggtggaacctccaggcaggaaccggctcgccaccctctgcccggtaagggctgcccaagaaagcattacccgccctcggggggtcgggctgtgggggtcccggcacctggcgtgagtttcatgtatgaaaacataaaattgaaaaaaaaaaaaaaacctacacgagcaccgtgatttcaagtaataaacagaaaatgaaacac

SEQ ID NO: 352 - DNA, 2477 bp, Homo sapiens
gtgtgtttctggatgactttcttgccaccggcaccagtgagcaggccccgcagctggagttcgagcagctgcccttcagccacccactgttcatcatgttctcatcgggcaccacgggcgcacccaagtgcatggtgcattccgctgggggcaccctcatccagcatctgaaggagcacctgctgcacggcaacatgaccagcagtgacatcctcctgtgctacaccacggtcggctggatgatgtggaactggatggtgtcccttctggccacaggagcggccatggtcttgtacgatggctcccccctggtgcccacgcccaatgtgctctgggacctggttgacaggataggcatcactgtcctggtaactggggccaagtggctgtcagtgctggaagagaaggccatgaagccgggtgagtgtgcctcttcagtactcattccctgtactgccaatcaaggaaattaaatccatcctatttcctgcttgcgagtgaggcttcaggcactgggtttagttttaatcttttggtgactctgcaccccagtggaaacccacagtctccagatgctccacacgatcctgtccactggctccccactgaaagcccagagctacgagtatgtctacaggtgcatcaagagcagcatcctcctgggctccatctcaggaggcaccgacatcatctcctgcttcatgggccacaatttttctcttcctgtgtataaaggggagattcaggcccggaacctgggcatggccgtggaagcgtggaacgaggaaggaaaggcggtctggggagagagcggcgagctggtgtgtactaagccgatcccttgccagcccacacacttctggaacgatgagaacggcaacaagtacaggaaggcgtatttctccaaattcccaggtatctgggctcatggcgactactgcagaatcaaccccaagaccgggggcatcgtcatgcttggccggagtgacggcaccctcaaccccaacggggtgcggttcggcagctcggaaatctataacattgtggaatccttcgaggaggtggaggacagcctgtgtgtcccccagtataacaagtacagggaggagagggtgatcctcttcctgaagatggcctccgggcacgccttccagcctgacttggttaagaggatccgtgacgccatccgcatgggcttgtctgcgcgacacgtgcccagcctcatcctggaaaccaagggcatcccgtatacgctcaacggcaagaaagtggaagttgccgtcaaacagatcatcgctggaaaagccgtggagcaaggaggtgctttctcgaaccccgagaccctggatctgtaccgggacatccctgagctgcagggcttctgagtcagactggctggcgtgtcactcagccgcacccgtgtgcactgtaacttttgtgtgctcaataaattatacagaaacctacagctgttgtaaaaggatgctcgcaccaagtgttctgtaggcttggggagggatcgtttctctgttttgttaaatctggtgggtacctggatcttccacacgagtgggattctggccttcagagaccaggagggagtgtctgggccgcaggtgtggcactgtggtgagagtgtgtgtctttgcacacacagtgcagtgggaacggtggggctggctggtgctgaagacagacacactcctgagccaaggttttgtcttcaacctccccgtcccgttgtcccattttgctctgtgaaggtgcaaatccctttcttcccttcccatctcaggctctcctgttttccctcagggtccagtatgcctttgagctttagctgttagaaaggaacccccgtgacttgacacagctttcacagctggctgctaggaccggcgggctgggtgttcacgtgtgtctgtgtcatggatgcaatgcaggccctggaggactgtgcgtcacccgtcaaccagagcgtgcctccgggccagcttccctccaaggaatgagtggatttcatacaggatctctttattgcacagactgaatggctttacatgtttctaatgtgaattaggcatgtgaagcagtgggtgtccacccgtgtccctcatgggtgagccctccagctgtgagcccaggcagtgtggtcaccgagtgaggaccctcctcaccaggaaccgcatccctgtgctgcctccacctgagagttgctagggggttcttgtcgagatcatgtcatcagcacccctaagtcaagtcacgggtttccatagccaggcagttggtatgtacaattcagttcagcgtatgaacttgtatctctaatctgatgtccatttttatattttttgaaactgagcacaatgaaatcctttcttgaatcattttccttttggattataaaaatatgggggaaagtgctatgatgaattttatgcaataaatgtatacatgtgtgcacatgcacccac

SEQ ID NO: 353 - DNA, 2439 bp, Homo sapiens
agaagaagatgaacacttcgatgacacagtggtttgtcttgatacttataattgtgatctacattttaaaatatcaagagatcgtctcagtgcttcttcccttacaatggagagttttgcttttctttgggctggaggaagagcatcctatggtgtgtcaaaaggcaaagtgtgttttgagatgaaggttacagagaagatcccagtaaggcatttatatacaaaagatattgacatacatgaagttcgtattggctggtcactaactacaagtggaatgttacttggtgaagaagaattttcttatgggtattctctaaaaggaataaaaacatgcaactgtgagactgaagattatggagaaaagtttgatgaaaatgatgtgattacatgttttgctaactttgaaagtgatgaagtagaactctcgtatgctaagaatggacaagatcttggcgttgccttcaaaatcagtaaggaagttcttgctggacggccactgttcccgcatgttctctgccacaactgtgcagttgaatttaattttggtcagaaggaaaagccatattttccaatacctgaagagtatactttcatccagaacgtccccttagaggatcgagttagaggaccaaaggggcctgaagagaagaaagattgtgaagttgtgatgatgattggcttgccaggagctggaaaaactacctgggttactaaacatgcagcagaaaatccagggaaatataacattcttggcacaaatactattatggataagatgatggtggcaggttttaagaagcaaatggcagatactggaaaactgaacacactgttgcagagagccccccagtgtcttgggaaatttattgagattgctgcccgaaagaagcgaaattttattctggatcagacaaatgtgtctgctgctgcccagaggagaaaaatgtgcctgtttgcaggcttccagcgaaaagctgttgtagtttgcccaaaagatgaagactataagcaaagaacacagaagaaagcagaagtagaggggaaagacctaccagaacatgcggtcctcaaaatgaaaggaaactttaccctcccagaggtagctgagtgctttgatgaaataacctatgttgaacttcagaaggaagaagcccaaaaactcttggagcaatataaggaagaaagcaaaaaggctcttccaccagaaaagaaacagaacactggctcaaagaaaagcaataaaaataagagtggcaagaaccagtttaacagaggtggtggccatagaggacgtggaggattcaatatgcgtggtggaaatttcagaggaggagcccctgggaatcgtggcggatataataggaggggcaacatgccacagagaggtggtggcggtggaggaagtggtggaatcggctatccataccctcgtgcccctgtttttcctggccgtggtagttactcaaacagagggaactacaacagaggtggaatgcccaacagagggaactacaaccagaacttcagaggacgaggaaacaatcgtggctacaaaaatcaatctcagggctacaaccagtggcagcagggtcaattctggggtcagaagccatggagtcagcattatcaccaaggatattattgaatacccaaataaaacgaactgatacatatttctccaaaaccttcacaagaagtcgactgttttctttagtaggctaactttttaaacattccacaagaggaagtgcctgcgggttccttttttagaagctttgtgggttgattttttttcttttcttttttgtacatttttaattgcagtttaaaagtgaatcgtaagagaacctcagcattgtgcacgataagagaatgtgtcagtatttcagggttctacattttatctgtaaaatgtgacttttttttttttttatcacaacagaagtaaaatgttgctttgtacctggtgtcttttattaagaatttactccccccatttctcacagagaataacagtcgggagtcattgtcacaatataatagaaatgttagcaaccagattcatgtaaggactaagtggtcctcatgaattgcattaagactctgtactgctcatattacactccatcctctctgtagtttgctgggtagtggagggggtaagctaaatcatagtttctgacaataactgggaaggttttttcttaaaataacaatggaattggtataattgggattgaaaactaaaacttggaactaagatagagaagatggagtgtatgtagaagggctgttaaaaatgtaaaacttggttgcattatttgtggaggctcaaacttgtgaaggttaataccataatttttccatttgttctgcattttgattctgaaaagaaagctggctttgcccatttcttattaaaaaaacttgttgtag

SEQ ID NO: 354 - DNA, 1612 bp, Homo sapiens
ttttttttttttgttcattccatcacattgaaaaggaggaaaacaaaaatgattttgaattcactcgatattttggactcctcagatgaacggaacattgcacacacacttggaacagagagagagagagagagaggaaagtggactcccacagggccacacgcaccagatcaaataacttggatacagtgcaagaatttcccaaaatgattgaatcatcattaccaaaaacttgccataacaacaccaagaaacaaaaaatgtttaagccacactgtttgacttgggatctttcctgctttttttttttttttttaaatgtttgccacacagagagaaagagggctagtgggtgggaaaggacagactcacagacgtgagcaggacaggaagggacttcagagtggagctgagaagagggtagggagagacaggctcaggagaggggagggtggggatgtggaaagccatttcttagagttcaggcatgttcttggtcagacctcaggttcctcttctttaccctcgtcctgccgggcactttccttaggtttggtttcatctacagcttctatgttctcttcagcttggctgctctccccagtctccgttggaggctgggctgttgccttggcagcagcatcctctgcggcaggggtggtggcagcagcagcagtgacagcagcaggcacatcggcttgtttaggctcctccttggctggggcatcttcagccttggaggacggcgagttatcagtggaagctttagtggcactttctgtctcagctgagccggccttctcctctgaggatgcaggagcctggggggctgcctgctctgtggcagcatcaccctcccccttcttctcctcggaaggagtttctcctgctttgccgggctcatcaggcttggagccagtggctggggctgcttcggcagtagtggtgccttctcccttcttctccaccccatcggcaacaggggcttcatccttcttattagcttcagcctcagcagcttggacatcatccttcttctctcctttgagctttttccttgttatgtgtccacggaagctagcctgaattttggttgcggccttatgagctttatcttctggtttgataccatcttgtactgatccagacccatcgtcaaactctattacctcaaatctctgattgctgactttctttccttttttgttccagacaattttaggtcttgggtctcccgtagcttggcagatgaaagaggcaactccgccagagacccctgtctgatcaacgggtgttcgtgtaaaccttggaggtgtctcagcatccgtgcggagaagaaagtgaggagcagcagcagcagcctggttacgtgcaccatcctgcagcttggcagcagcgtgcgcgagcagcttggaatcactgcctccggagccgcagcgagtctgtccgatctgaaatttcagctggaacactttcagagcctggtcatgttggccccgggcagccgccgccaccgcctcccgcgccgccgccaacactttcctccagcgccttcgcgccccgccacggccgcgccgccgcctccgggcggccaatttaatcccgcggagca

SEQ ID NO: 355 - DNA, 2142 bp, Homo sapiens
ttcatggctgaggaggtcgcagcgccatgaagtccctgtctctgctcctcgctgtggctttgggcctggcgaccgccgtctcagcaggacccgcggtgatcgagtgttggttcgtggaggatgcgagcggaaagggcctggccaagagacccggtgcactgctgttgcgccagggaccgggggaaccgccgccccggccggacctcgaccctgagctctatctcagtgtacacgaccccgcgggcgccctccaggctgccttcaggcggtatccccggggcgcccccgcaccacactgcgagatgagccgcttcgtgcctctccccgcctctgcgaaatgggccagcggcctgacccccgcgcagaactgcccgcgggccctggatggggcttggctgatggtcagcatatccagcccagtcctcagcctctccagcctcttgcgaccacagccagagcctcagcaggagcctgttctcatcaccatggcaacagtggtactgactgtcctcacccacacccctgcccctcgagtgagactgggacaagatgctctgctggacttgagctttgcctacatgccccccacctccgaggccgcctcatctctggctccgggtccccctccctttgggctagagtggcgacgccagcacctgggtaagggacatctgctcctggctgcaactcctgggctgaatggccagatgccagcagcccaagaaggggccgtggcatttgctgcttgggatgatgatgagccatggggcccatggaccggaaatgggaccttctggctgcctagagttcaaccctttcaggagggcacctatctggccaccatacacctgccatacctgcaaggacaggtcaccctggagcttgctgtgtacaaaccccccaaagtgtccctgatgccagcaacccttgcacgggccgccccaggggaggcacccccggaattgctctgccttgtgtcccacttctacccttctgggggcctggaggtggagtgggaactccggggtggcccagggggccgctctcagaaggccgaggggcagaggtggctctcggccctgcgccaccattccgatggctctgtcagcctctctgggcacttgcagccgcccccagtcaccactgagcagcatggggcacgctatgcctgtcgaattcaccatcccagcctgcctgcctcggggcgcagcgctgaggtcaccctggaggtagcaggtctttcagggccctcccttgaggacagcgtaggccttttcctgtctgcctttcttctgcttgggctcttcaaggcactgggctgggctgctgtctacctgtccacctgcaaggattcaaagaagaaagcagagtgagggcactcactgccatcctgtggaagccaccatcatctctggcccaagcttctgtagtagctccctaaaataataccctatcatctgctcctaatccctccaatctctctccactgagtggctggaatgctttttttttttttctttcacttatataagggataatttttctttttttttttttttgagacggagtctcactcttccgcccaggctgcagtgcagtggcatgatcttggcttactgcaacctccgcctcctgggttcaagcaattctgtggcttcagcctccggagtagctgggattacaggcacatgccaccacacccagtgaatttttgtatttttagtagagacggggtttcaccatgttggccaggctggtcttgaattcctgacctcaggtgatctgcccacctcagcctcccaaagtgctgggattacaggcgtgagccaccacaccaggcccgagaaatgcttttttaaaaaacacacatcttatggcattcaccttcttggagctctaggacagtggttctcaaaatttttttctctcaggacctcttaaaaatcatcaaggaccccaaaaagcttttgggtatgtgggttatagctatcaatatttatggtactagaacttaaaagtgagaaaaatttaaaacacgagaatacataggcacacattctattcatcgtgggaaccatggtgtcaatacatatcatgtagcttctgaaaaactccactgtacacttatagaatgaagaaggc

SEQ ID NO: 356 - DNA, 2048 bp, Homo sapiens
cgcggctgctggacaagaggggtgcggtggatactgacctttgctccggcctcgtcgtgaagacacagcgcatctccccgctgtaggcttcctcccacagaacccgtttcgggcctcagagcgtctggtgagatgctgttgccgctgctgctgctgctacccatgtgctgggccgtggaggtcaagaggccccggggcgtctccctcaccaatcatcacttctacgatgagtccaagcctttcacctgcctggacggttcggccaccatcccatttgatcaggtcaacgatgactattgcgactgcaaagatggctctgacgaccaggcacggctgcctgtcctaatggcagcttccactgcaccaacactggctataagcccctgtatatcccctccaaccgggtcaacgatggtgtttgtgactgctgcgatggaacagacgagtacaacagcggcgtcatctgtgagaacacctgcaaagagaagggccgtaaggagagagagtccctgcagcagatggccgaggtcacccgcgaagggttccgtctgaagaagatccttattgaggactggaagaaggcacgggaggagaagcagaaaaagctcattgagctacaggctgggaagaagtctctggaagaccaggtggagatgctgcggacagtgaaggaggaagctgagaagccagagagagaggccaaagagcagcaccagaagctgtgggaagagcagctggctgctgccaaggcccaacaggagcaggagctggcggctgatgccttcaaggagctggatgatgacatggacgggacggtctcggtgactgagctgcagactcacccggagctggacacagatggggatggggcgttgtcagaagcggaagctcaggccctcctcagtggggacacacagacagacgccacctctttctacgaccgcgtctgggccgccatcagggacaagtaccggtccgaggcactgcccaccgaccttccagcaccttctgcccctgacttgacggagcccaaggaggagcagccgccagtgccctcgtcgcccacagaggaggaggaggaggaggaggaggaggaggaagaagaggctgaagaagaggaggaggaggaggattccgaggtgcagggggagcagcccaagccggccagccctgctgaggaagacaaaatgccgccctacgacgagcagacgcaggccttcatcgatgctgcccaggaggcccgcaacaagttcgaggaggccgagcggtcgctgaaggacatggaggagtccatcaggaacctggagcaagagatttcttttgactttggccccaacggggagtttgcttacctgtacagccagtgctacgagctcaccaccaacagaatacgtctaccgcctctgcccgtttcaagcttgtcttcgcagaaacccaaactcgggggctctcccaccagccttggcacctggggctcatggattggccccgaccacgacaagttcagtgccatgaagtatgagcaaggcacgggctgctggcagggccccaaccgctccaccaccgtgcgcctcctgtgcgggaaagagaccatggtgaccagcaccacagagcccagtcgctgcgagtacctcatggagctgatgacgccagccgcctgcccggagccaccgcctgaagcacccaccgaagacgaccatgacgagctctagctggatgggcgcagagaacctcaagaaggcatgaagccagcccctgcagtgccgtccacccgcccctctgggcctgcctgtggctctgttgccctcctctgtggcggcaggacctttgtggggcttcgtgccctgctctggggcccaggcggggctggtccacattcccaggccccaacagccttcaaagatgggtaaaggagcttgccctccctgggccccccaccttggtgactcgccccaccacccccagccctgtccctgccacccctcctagtggggactagtgaatgacttgacctgtgacctcaatacaataaatgtgatcccccaccc

SEQ ID NO: 357 - DNA, 1485 bp, Homo sapiens
acagggagcggatgatgaagcagaccccctcctgtcatcaccctctcctggtgtagtgtggatgcgaggccacggctcagtgatgggctcaccacccagaagtggggagagactttgggcctcccacccagtggggcttggcctggcttctgtggcctgggcgtgttgtggactcaggcactggggcctgtcaccaaggctcctccaacatgcgggaggaggcttagcagacttgcgctgcaccagcgaatctgcctgggctgctcctgtcccacccaccctcactgagatccatgtaaggggctcctcttcccacctggaacttgtgagtggggacccatgatgtatgggtctcacctgacttgaggtgaattttggagtgaagggccctgaggtcagctcccaagtcggtcgtgctgggccaggcctggttttcacaggggctgaaggatcccagtccacctgtgtgcatgtcagggctcggccgggaagaagccagcaaagtcccccgtgtcccttgctgagtattctgtcacagacaagcctccattaaagccacagcagtgctacccaccacacacaccttgctggcccggccaccactgctggcttcagccccttgagcagcccatggcttagcagacccccagatgtaggtcagtggccttacctgtctctatccatgctgtcaactcctgcctccacctggggtcacccagtcacattgggaagggctgtgaaggcctccaggctggccccttccaggggaatcctggaggcctggggtgggctcctgccccttctgccctgccttgcccctgcactatgctcttggctcctgtggaaggagggctgccctcttgccctagtgagggccccatgtggatccactctagtgctgggagccagcgctcccttactgggaacaggattccaggacccctttcttgttgtggctgccatgaagccacagctccttggggaagtgacctgctctcctttgggtgtatgcaggtgtgtggggggccctgagtggcaagttgcttagctaacaggagatccataggcagcctgcaggctaggaagtggcctagtgcaagatgagctgggaacaagggaggagagagcaggagctggggcagaggctgagccgggaggcccttgaggtgaggacacagcaggcccaggaccatggctggggaggatatgtcagcacctggaagtggagtgcaggctgcagcgcccagccatgtgggccaggtgcattcactcagagtggggccacacacccatctacccagtttccacaagatgtggctcctgccacacccacagggcagcctcctccaaatccctcctggaggggcctacccagaagcctccttgaaccagtctgcaaccctgctctatgctgacccttgtcactgaaccctgatctagacttatatgaataaatgaaattacatgccaagggccctaaaaagc

SEQ ID NO: 358 - DNA, 2415 bp, Homo sapiens
tgacatttagccccatggatcggttaacagcagaagaagcactctcccatccttacatgagcatatattcttttccaatggatgagccaatttcaagccatccttttcatattgaagatgaagttgatgatattttgcttatggatgaaactcacagtcacatttataactgggaaaggtatcatgattgtcagttttcagagcatgattggcctgtacataacaactttgatattgatgaagttcagcttgatccaagagctctgtccgatgtcactgatgaagaagaagtacaagttgatccccgaaaatatttggatggagatcgggaaaagtatctggaggatcctgcttttgataccaattactctactgagccttgttggcaatactcagatcatcatgaaaacaaatattgtgatctggagtgtagccatacttgtaactacaaaacgaggtcatcatcatatttagataacttagtttggagagagagtgaagttaaccattactatgaacccaagcttattatagatctttccaattggaaagaacaaagcaaagaaaaatctgataagaaaggcaaatcaaaatgtgaaaggaatggattggttaaagcccagatagcgctagaggaagcatcacagcaactggctggaaaagaaagggaaaagaatcagggatttgattttgattcctttattgcaggaactattcagcttagttcccagcatgagcctactgatgttgttgataaattaaatgacttgaatagctcagtgtcccaactagaattgaaaagtttgatatcaaagtcagtaagccaagaaaaacaggaaaaaggaatggcaaatctggctcaattagaagccttgtaccagtcttcttgggacagccagtttgtgagtggtggggaggactgttttttcataaatcagttttgtgaggtaaggaaggatgaacaagttgagaaggaaaacacttacactagttacttggacaagttctttagcaggaaagaagatactgaaatgctagaaactgagccagtagaggatgggaaagcttggggagagaggacatgaggaaggatttctgaacaacagtggggagttcctctttaacaagcagctcgagtccataggcatcccacagtttcacagccagttgggtcaccacttaagtcaatacaggccacattaacaccttctgctatgaaatcttcccctcaaattcctcatcaaacatacagcagcattctgaaacatctgaactaaaacactcagcagacatttatctttgtattcttcatgaaatgtgttttgtctttttttattactagtgtttaagtcattttttacttgaatcagatggtgtcatttagtaaggattttatgagttcttgttttttaaaatccagactttctttttctacatgtgagatagttttcattttaactggcatgtcatttgcacacaaaaataaagactagagcaaaataatgcaacgcaggaggagaaaagaaatgcactaagacaagaacattctctcatagaacattgatctgttttacaggaaacaaaccttgccttgaaatttacacagtgagactgtacataattgcatgaaaatagctatttttttcctaagacatttttcattcatgaatattttcaagtttttcatactgtacacatttcttaaaacacatgataccagcagcaactgaaaatgaatgccgaatttggtacacatgtgttatctacctcaaggtaacaagagtatgtggcaaaacatataccacccatagtgcttcacaaaatgcacttctatttagccagcgtttattgtagtaaactattcttaataaaactcactcactgtttataaatgttctggtatgcattctttatagtgaagtgttaatacatcacatcttatttattttagcaaatcagtatattttctgtatttaattataaaaaattaacttagtttttaaaatttatttgcaaatatactttttccatttggcactatggtttgttgcctacctagctgcatctataatgtcagcttatcctaaggctgtccacgtacttaatttacttaagtgttcattttaagtaacgtgctcactgtgtataggaatttgtattttggaggtgcttgatctatctacaaagaaaaattaattaggaattactttattataaaatgctcctagaagtcttaattgtgtttattttttaaaaaaacaaatgttagacttgtgtgcatggaagtaattaaggtacatcattattgtagtttgaaagttgtacatgataagacattttgtttttactgtatgtttttactgaatgatctattccccatcccaaggcaagcatgaataaaattaggttaaacgt

SEQ ID NO: 359 - DNA, 1463 bp, Homo sapiens
taatccctgggtgcacttcgagagaaaggttggacctcgcctgagggatgctggatctgcaatgatagaattggcctgccacagacattggtatttaagttgaagagcagaattcacaatgattctgctgcagagagctttaatggcaatgagactctggggcacagttcaattgcttcagggggaacacacagcagggagatgggagactccaacagtgatggcaaaactgggctggagcaagatgaacagccactgaacctgagtgacagtcccctctctgcgcagctaacttcggaatacagaatagatgatcacaacagtaatgggaaaaacaagtataagaatcttctaatttctgacctcaagatggaacgagaggcgagagaaaatggaagcaagtctcctgcacatagttactccagctatgactctggcaaaaatgagagtgtagaccgaggagctgaggacctctcactaaacaggggagatgaggacgaagatgaccacgaggaccatgacgattcggagaaagttaatgagacagacggcgttgaagccgagcggctgaaagcttttaattctcgacctattccttcccaccttacttcagcagttgcagagagtatcttggcttcagcttgtgagagtgagagtagaaatgccgccaagaggatgcgtctggagagacagcaggatgagtctgctccagctgacaaacagtgtaaaccagaggcgacccaggccacttactcaacatcagctgttccaggctcacaggacgtgctgtacatcaatggaaatgggacctatagttaccatagttacagagggctaggagggggtctgctaaatctgaatgatgcttccagcagtggacccactgatctcagcatgaagagacaattggcgactagctcaggatcctccagcagctcaaactccagaccccagctgagtccaactgaaatcaatgccgtgagacagcttgttgcaggatatcgagaatcagctgcatttttattgcgatctgcagatgaactggaaaatctcattttacaacagaactgagacagacgaccaccatattcactgaggtctaaatttgcagtttccactaatgacattttgatttcccaacagagatacttctggtcttactgcacagtcttttaagagaaatacttccattatgccacattgcccttgacccgtaagtgatgtgttaaggtgcttcaaaggaactctgacctctgaagtacttgagctactttagtatgtccagcctattgctttttgttttagtgtgtcaccataaatatcaggggcataaaaggctatctattcttaattcaaggataaaacagaagaagcttgtggtataaaacaatagttcaagatccagctgaaatattagtggaatttgctactgactcattggactgaaagctgaagtacctggc

SEQ ID NO: 360 - DNA, 1871 bp, Homo sapiens
gccgcttttttttttttttttttttttttttttttgtgggaaaatattttattgctgccatccccatggtgagccgctgggggtgaggggtgaagctgggtggtggatcacagcatcttctggaatagggcgatggcctcatccaccttcctgagctctgcttctgtctgttggagcttggcttcatctgcctcctggacttcgagcggcaccttgacaggatagcccgaggcagcacggcgttcccgcagacgctgggcctgccgctgggcctcaactcgcttggcttgcagcttgcccagctcccgtgcagggtccaccagcccctgaagctgcaggtggatggagcagcgatcagaagccagagccacagcgcaaccctggggggcgggagcccccagggccagaacagccaccacacctgcgctggccagggcctgcacgtagcccgacaccgccgatgccagggcgcccgtggcctcatccgccacttccaggaaacagtcaggccggatccgggtgaggttgtagtcggcccgcagggagcgcacggctcgcgtgatgcttagcgccagctcaagggcggcttctgcctcggggtccttccaggagcactctgagggctccgggtagggggtaacacagaggctagggggagcttgcggcatcctccggggcagcctctggaacagctcctccgtcacgaagggcatgaagggtgagagcagccgcaggccaacgtccaggcaagtgtacagggtctggcgggcacactcagctgccacctggtccaccccattcagtacaggtttcaggcactccaagtagacatcacagagctcatagagccagaagctgtactgggcagtggtgacggccgggaagtcgtaggcctggaagccttgattgctgagcctcacagcctctgtcaggcggctgcggatccagcggtccaccaggctctcatggcctccgggctgggaggtgggtgagggcacaaaacccttcccaaggccacgaagggcaaacttggtggcattccagagcttgttgcagaagtggcggtaacccagtatcggttcacatccaggttgatgtcacgaccttgggacatgtaggcacataatccaaaccggagagcatcggtgccacattcaggaatccccgctgggaagtcagctttctgcccttctttggccttctccacctcgctgggatccaggttgctgttcagcagctggttgtggaggccctgcagggagattccatagatgacatccaggggatcgatgacattgcctagagacttgctcatcttccggccgtgagcatctcgcacgatggcatggaggtagacctctctaaagggcagcctgcccgtgagcttcaggcccagcatgaccatccgggccacccagaagaagaggatgtcatgaccggtctccagcagtgtcccggggtagaacacactcaggtcttctgactggttgggccagcccaaaatggataaggggaagaggccagaggagaaccaggtatccaatacatcctcatcttgctggagactgatcttgtcaggggacactccgaactccttggctgccttctcccgggcctccgcctcattgcgtccactcacccagtaccgcccatcagggtcctccccagggggcaccgctgggtcactgacagtgacaaagtaggctgggatgcgatggccccaccacagctgcctggaaatgcaccactcccggatgttgtccatccaggcatgccatgtgcgctgatgggcctcaggcaggatgcggaggtcaccccgagtcacagcggcgctggcagcctgggccatctccccgcagcgaacgtaccct

SEQ ID NO: 361 - DNA, 2400 bp, Homo sapiens
ctgaagcttgaggaagctctgcccccgacagcagtggcgatttgtcaaggtcacacagtgagttaccggcggagaagggacccgaactcccaaacaaactacacctgcaagcgtttgatgtttagactttctccccgatgtataagggatctctggacaggacaagactccgaagctactcccccagcacacagcccgggacccacaaacccagcttgcccccagccctcccacctgccactccctggcccctcccaccgcccgccccccttggggcgcagggcatggtgtgaaaggccaagtgctgaggcgggtatcatgggtgctgtgccctagggcctgggtggcagggggtgggtggcctgtgggtgtgccgggggggccagtgtgcccaccccagtctcttggcgtgctggagggcatcctggatggaattgaagtgaatggaacagaagccaagcaaggtggagtgtgggtcagacccagaggagaacagtgccaggtcaccagatggaaagcgaaaaagaaagaacggccaatgttccctgaaaaccagcatgtcagggtatatccctagttacctggacaaagacgagcagtgtgtcgtgtgtggggacaaggcaactggttatcactaccgctgtatcacttgtgagggctgcaagggcttctttcgccgcacaatccagaagaacctccatcccacctattcctgcaaatatgacagctgctgtgtcattgacaagatcacccgcaatcagtgccagctgtgccgcttcaagaagtgcatcgccgtgggcatggccatggacttggttctagatgactcgaagcgggtggccaagcgtaagctgattgagcagaaccgggagcggcggcggaaggaggagatgatccgatcactgcagcagcgaccagagcccactcctgaagagtgggatctgatccacattgccacagaggcccatcgcagcaccaatgcccagggcagccattggaaacagaggcggaaattcctgcccgatgacattggccagtcacccattgtctccatgccggacggagacaaggtggacctggaagccttcagcgagtttaccaagatcatcaccccggccatcacccgtgtggtggactttgccaaaaaactgcccatgttctccgagctgccttgcgaagaccagatcatcctcctgaaggggtgctgcatggagatcatgtccctgcgggcggctgtccgctacgaccctgagagcgacaccctgacgctgagtggggagatggctgtcaagcgggagcagctcaagaatggcggcctgggcgtagtctccgacgccatctttgaactgggcaagtcactctctgcctttaacctggatgacacggaagtggctctgctgcaggctgtgcttgctaatgtcaacagaccgctcgggcctgctgtgtgtggacaagatcgagaagagtcaggaggcgtacctgctggcgttcgagcactacgtcaaccaccgcaaacacaacattccgcacttctggcccaagctgctgatgaaggagagagaagtgcagagttcgattctgtacaagggggcagcggcagaaggccggccgggcgggtcactgggcgtccacccggaaggacagcagcttctcggaatgcatgttgttcagggtccgcaggtccggcagcttgagcagcagcttggtgaagcgggaagtctccaagggccggttcttcagcaccagagcccgaagagcccgcagcagcgtctcctggagctgctccaccgaagcggaattctccatgcccgagcggtctgtggggaagacgacagcagtgaggcggactccccgagctcctctgaggaggaaccggaggtctgcgaggacctggcaggcaatgcagcctctccctgaagccccccagaaggccgatggggaaggagaaggagtgccataccttctcccaggcctctgccccaagagcaggaggtgcctgaaagctgggagcgtgggctcagcagggctggtcacctcccatcccgtaagaccaccttcccttcctcagcaggccaaacatggccagactcccttgctttttgctgtgtagttccctctgcctgggatgcccttccccctttctctgcctggcaacatcttacttgtcctttgaggccccaactcaagtgtcacctccttccccagctcccccaggcagaaatagttgtctgtgcttccttggttcatgcttctactgtgacacttatctcactgttttataattagtcgggcatgagtctgtttcccaagctagactgtgtctgaatcatgtctgtatccccagtgcccggtgcagggcctggcatagagtaggtactccataaaaggtgtgttgaatag

SEQ ID NO: 362 - DNA, 1798 bp, Homo sapiens
ccatactgctgaggcctcaggactgctgctcagcttgcccgttacctgaagaggcggcggagccgggcccctgaccggtcaccatgtgggccttctcggaattgcccatgccgctgctgatcaatttgatcgtctcgctgctgggatttgtggccacagtcaccctcatcccggccttccggggccacttcattgctgcgcgcctctgtggtcaggacctcaacaaaaccagccgacagcagatcccagaatcccagggagtgatcagcggtgctgttttccttatcatcctcttctgcttcatccctttccccttcctgaactgctttgtgaaggagcagtgtaaggcattcccccaccatgaatttgtggccctgataggtgccctccttgccatctgctgcatgatcttcctgggctttgcggatgatgtactgaatctgcgctggcgccataagctgctgctacctacagctgcctcactacctctcctcatggtctatttcaccaactttggcaacacgaccattgtggtgcccaagcccttccgcccgatacttggcctgcatctggacttgggaatcctgtactatgtctacatggggctgctggcagtgttctgtaccaatgccatcaatatcctagcaggaattaacggcctagaggctggccagtcactagtcatttctgcttccatcattgtcttcaacctggtagagttggaaggtgattgtcgggatgatcatgtcttttccctctacttcatgatacccttttttttcaccactttgggattgctctaccacaactggtacccatcacgggtgtttgtgggagataccttctgttactttgctggcatgacctttgccgtggtgggcatcttgggacacttcagcaagaccatgctactattcttcatgccccaggtgttcaacttcctctactcactgcctcagctcctgcatatcatcccctgccctcgccaccgcatacccagactcaatatcaagacaggcaaactggagatgagctattccaagttcaagaccaagagcctctctttcttgggcacctttattttaaaggtggcagagagcctccagctggtgacagtacaccagagtgagactgaagatggtgaattcactgaatgtaacaacatgaccctcatcaacttgctacttaaagtccttgggcccatacatgagagaaacctcacattgctcctgctgctgctgcagatcctgggcagtgccgtcaccttctccattcgatatcagctcgttcgactcttctatgatgtctgagtcccttgatcattgtcctttacctcacagtctctaggattcctgactcaggctgacctctctctctggtcccagactgcctccttgcccaggcctctctcactcttcatactcctccagattttgttctcagcattttcctttctctgtgatcattggcatcctgggcgtttcttgccctctactgactactgattggattttacctatggctttctgcaacttgctactctctccctctccatcccatctttgcagcctcatagggtgggatacagcagctttttttgcagttatccacactcacatttcagagtcctgactctcaaggaaccactggtttttgggatagaacttgggccagggctaggaacacaggctccacggtgacatgtcatttgattgtaaattaagtgctctgattagtaagaactaagcagggggccacatgctctcaatggagacaataaagtgttgtctttttctcc

SEQ ID NO: 363 - DNA, 2700 bp, Homo sapiens
gggaagctcgggcaccctccctctccggggctcctgctcccacccctccggcccccccaccgtcgcgctcctccaggctgggcctgtggccgcggtgctttttaattttcccccagctcagaatcttgctgctcggcccccaggagagcaacaactcaacgggaacgatgtggaaggtgtcagctctgctcttcgttttgggaagcgcgtcgctctgggtcctggcagaaggagccagcacaggccagccagaagatgacactgagactacaggtttggaaggcggcgttgccatgccaggtgccgaagatgatgtggtgactccaggaaccagcgaagaccgctataagtctggcttgacaactctggtggcaacaagtgtcaacagtgtaacaggcattcgcatcgaggatctgccaacttcagaaagcacagtccacgcgcaagaacaaagtccaagcgccacagcctcaaacgtggccaccagtcactccacggagaaagtggatggagacacacagacaacagttgagaaagatggtttgtcaacagtgaccctggttggaatcatagttggggtcttactagccatcggcttcattggtggaatcatcgttgtggttatgcgaaaaatgtcgggaaggtactcgccctaaagagctgaagggttacgccctgctgccaacgtgcttaaaaaaagaccgtttctgactctgtgccctgtccctgagctcgtgggagaagatgacccgtggaacacttgcctggcccactcagaatccacggtgacctctccgcttgccaaaataaccgaaggaaagaccgttcaccagacttggctcctctaaacatttgctgttcaaacatgtttttgaatatacattctataaaagattatttgaaagacaaaattcatagaaaatggagcaaaactgtataaactgatttgtaactaacactggaccattggatcgatattatatgctgtaaccatgtgtctccgtctgaccattcttgttattgttaaaatgcagaggaatctggaaatatttatatccacggagtccttggatccagtgctacgtcagtaaatagcaccagcattttgcaattgctgatctgctgaaatgtacacattctggtctagtttggtctatcttttaaagcctgatctggtgtgaataatcaactaggaaatctaaacttggataacacgtggtgaacaactgcctttagctggtccagattaatcatttcaaagacatccattttagatcacaagcaggaagtcgatagtctcaaaggcactttgtttctcccaagtaggccaccaggcagcctctagagttgctttacccaaatccttctccagccatgacttggtgactctaagcttgctcccacctgccccctccacttccctcagatgatgaggagccagggctaagggggcagccttctctcttcccagtgatgcacatccttcacattggctgctttgttctggaatatggatatctcagcctggatgccgaggaagctgctggatgcttaatggtgctagaggctcaagtgtgtttgaaaccaagagccagttgtcccccatgcagaaagaaatcctgtgtgagcctctggtatgagaaataaaatctgccagttttataacattcactttctgcctctgaggaaagatacagggaacaaaaatcaatttgtacagtcttaatattaaaagcagcttgactaaatacctgatttaaaaatagaagacatccccagtcctcatgacataccgcaaatatctgtggggtcctgttgaaaagaacaaaataaaggagcccaaggggtcattctgtctcagcaccatccagcctggcacttctcttcccatatatccattggatttttttttttttttcctaaacaaagtttttacactgagcagatgctctgtcatgatggcggttgtgcaattctggtatcctctaaatttgtaagcattcataaaacaggaaaaagtaaactatcattcggaagcacagcccattcctcccattttttgcaatgatgtctggatgttattttaaacagtgtgtctgtgtgttcccaaatccagctggccccaccagctcagattccattttttttgtgtgtgtgtgtgaaacgtagtctgcaactctgcctcccggcaattatacatgtgtcaggatgtcaaaaagcaattctcctgcctcagcctcctgagtagctgggactacaggttcctaccaccacacccggccaatttttgtatttttagtagagatggggtttcaccgtatcggcgaggatgatctctatctcttgacctcgtgatctgcccgcctcggcctcccaaagtgctgggattacaggcgtgtgccactgcgctcggcctcagattccatatttgaacaccagctgattgagagaaggggaatgagaagagctggatgagtttaaataactttcattgttcagattcctgaacaggagttgggataatggccatcttttctttcctatcctttcttcccccctcactgtgaaaaataacagtccaccccaagtcatacactggacccagtgcctgcggggacaggactgtgggtttcttggtcacacctgtgttggtgctcaatgcagtgtagacatgttttcaaataaaacaaatgattgtac

SEQ ID NO: 364 - DNA, 2803 bp, Homo sapiens
ctccgcttcgccgctccgaacctcctcctggtcgtcccggcattcgtccacgcggagccggcttgggcggggcccgggaggcggcggccggagaagccgcggagacgcgagcgccgagcgtcgcgagggagcaggcccgggcaggcaagcggcggcctccgccatgaaccccaggggcctgttccaggacttcaaccccagtaagtttctcatctacacctgcctgctgctcttctcggtgctgctgcccctccgcctggacggcatcatccaatggagctactggggcgtctttgcccccatatggctgtggaagcttctagtcgtcgcaggcgcctccgtgggcgcgggcgtttgggcccgcaaccctcgctaccgcaccgagggagaggcctgtgtggagttcaaagccatgctgatcgctgtgggcatccacctgctgctgctcatgttcgaagtcctggtctgcgacagggtggagaggggcacccacttctggctgctggtcttcatgcctctcttcttcgtgtcccccgtgtccgtggctgcctgcgtctggggctttcgacacaataggtcgctggagctggagatcctgtgctcggtcaacatcctgcagttcatcttcatcgccctaaagctggacaggattattcactggccgtggctggtggtgtttgtgcccctgtggatcctcatgtcgttcctttgcctggtcgtcctctattacatcgtctggtccctcctgttcctgcggtccctggatgtggttgccgagcagcggagaacacacgtgaccatggctatcagttggataacgattgtcgtgcctctgctcacttttgaggtcctgctggttcacagattggatggccacaatacattctcctacgtctccatatttgtccccctttggctttccttactaactttaatggccacaacatttaggcgaaaggggggcaatcattggtggtttggcattcgcagagacttctgtcagtttctgcttgaaattttcccatttttaagagaatatgggaacatttcatatgatctccatcacgaagatagtgaagatgctgaagaaacatcagttccagaagctccgaaaattgctccaatatttggaaagaaggccagagtagttataacccagagccctgggaaatacgttcccccccctcccaagttaaatattgatatgccagattaaactcctagagaggacccaggcacacacagactccacttggccttcgcctcttgttcattcatcccaaacctggaaatggaaacaggcttcaaacactcgtctcacgccgtgtttgagatcaccgcctcatcagtatgcatcatagatggaggtggtttcagtatgtgggtgtgtgtggtgtgtacctgggtaagagacttgctttccaggttcgcactttcaggtgtagctgggggcagtaagtcgaattgttttagtaggtcctcaaaaggaataaccacacagctgtttgtttaaatgctactgtacctatcaaaactattgtttaaaaagtatttttatacactgctaatctaaaattgtatttcagattgtgcctgtcataacaatagcaaatgtaaaaagttctctttcccaccacttgtttataaacctcatagttgatatttttagtgttcctactgttaaaatactctctccttgggctttgctgatactggtctttaatattctgataggtgaatttttctaatggaatgaacccatgcatatatagtatttatatgaatattttagcagtgtaatatgttgaattctagttctctgcattaccattattacgttaaagtattttttaaagcttaggtgtgaagatatgtgtctattgcagatgtccttgaaaactgcataaaacagtatgtgcctggtgtggatcttaccaaagtactaggcatgaatgtagggactgcaaatcccatgggtcttaatatttaggtgttagtaaccaaggtctctggtagtacccgttagtagaggaagaggccactgcccttgggaacttgtgacaggctctagtgtggtaccaggccataaagtgacactgttatttagcaacttgaatttttccacacaggtagtaactgtgtggaaataagcaacaagtggtttgtccatttctaagaatcttaaactattagttggctgtagtgtgaagcattacttgtcattggaaagatggagagagtggccttaaccggaagtggtcagtagaagcaggtgtcattttaagggccaaactttaatctgtcagcaatagggaaacaactgttcaaattatctttgtagataagaccagtgtttcttttttcttttcttttgtttttttgtttgtttgttttgttttgttttgagacacagtttcactcttgttgcccaggctggagtgcaatggcacaatcttgatctcagctcgccgcagcctccgcctcccggttcaagcgattcttctgcctcagcctcccgagtagctgggattacaggcatgcaccaccacgcctggctaatttcgtatttttaatagagacagggtttctccatgttggtcaggctggtctcaaactcctgacttgaggtgatctgcccgccttggcctcccaaagtgctgggattacaggcgggaacctctgcacccggcaggtacagtgtttctttaggtgctggtggtacaccagggaatcagggcagaagctggatcctgcaagagtaatgtttgagaacaaataaatactttcgaaaggaggtcgaaac

SEQ ID NO: 365 - DNA, 2340 bp, Homo sapiens
gccgcttttttttttttttttttttttttttttttcatatgctgctttatttctgtaaggatacactgaaacgttagatgataatagctaatgacagaatgtagaaatgaggcatcagcttctctaaccactcctacaagaatgttagtatgtattgtcattacatgtttacttttgatattgtctcattatactatgtcatataataatgtagaatacagtaagtaggtgatcctgcatttcaggtaagcggtaggtggaaatccagatttcctcttgaggaaaagtcctaggaatcacaacagaagggactttgcagtcctcattaacacatggacaaagagcagacaactactacgttacaagggattcaactagtcactgttgtgaaatgtcatatccatgttgatgacagccctggcgcctgctcaactccccctctagagttttgcggttacttctgtaggatgaatttcagcactgcaggaacatctgagggggctaaaatattttcatgcaagtttccaaacccataaactattttgctatcaattaaaacaaaaatattaattaaaaacaataaaaaggacagcagggttagttttgttaagcttccagaagtattcgttgtgacgatgttcctctgaaacaggctcgttttctcaggtctttctacacttcccaaatcacctgcatgttccatgctttaaagtaggaacgctcagaaaacatgccacacggggaaaccaaacgttagtacggggaaaggtcagtttagaattacagctaagttcaaatgttaattttctggaagttcgtgttagttatttgaaagcacaaaagaacagaaggaagggcagagttctgatgaggaagttaaaccatgcatgtcagtagggttcttttcctgctcacagaagagggtgagcagtgagttggagcagccgctgcaactcttgcatgtcgtgtgtctacacggtgggtcccagctgaggcatgagaggcatctcagtgggggttttatctcctatgcttcttgcttacatcactaagtggctaaatgattagcacttttctgctctatgagaaacatgcagaagagtcaatctacctaagttttcatttttaaattgcagccggacagaaattcactttgctgcagggttgctttttgctaaatgctaatatgatcactgtgtgcccttatttgagtaatactgtaaaatgggagaaaagacggaaggagaactttaaagaaggaaaggaccactcttcccctattgatggtatagggcagaaagtaaggacacaaagaacgagattcaaatgccattttacaggacaggagcccctgtcagtttacagctttttggcacagtcgggacaatacacttgctcctggtggaaaacaaagcgcttgttggccagattcacggagcattttttgcagtggaagcagtagtcgtgccaggattgtccttcataggccaccacactggagcctttaccaaacccagtgatggggttcttgcatccagcacacttcttggccacaaagttcttgtagcaatccacgcagtaatactggtcctccacagcggtgaaacgctgcccagccagcttcttagagcaggtaacacacacaaagcaatcggcatgccagggctgatcctggtaagtgattcctccagatgtgatggccttgttgcacttcacgcaatgcttggcaaacttggtctcatggcaagtcacgcagtagaagtcctcccctttagggaagaagcttccagtcccgatgacttgcttgcagttactacaggtgaagcagtctttgtgccagacggtccccttgtactccacgttttgatctcctgccacaatggccttgaagcaccccttgcacttgggggagtcctcccgagtggtgcacttgttgcacaggatcttgttgtccttggccacaaaggtctcattggccaaggggtgaaggcacttggcacagcggaagcaggtgtcatgccagaagcggttcttatagtgcacctccttggagtccgcaccgatgggcttgcggcattccacacaggtgttggcacagaacttgtcaaagcatttcaggcagcagtggtggccatccttttgcacatacttcttcccctgcaagggatccctgcagtagtggcagtcaaacttctccgccatggtgcccaccttgtagctggagggacctcacgctggatgtgtggcagataggatgtattcggcaaaggctggatatggttgaaaacaacttccaaggtgctgcgtggggatgctcgcccgcgcagctgtctcgcggcg

SEQ ID NO: 366 - DNA, 2022 bp, Homo sapiens
gtctacacttttagcaagcttctcaagctgattcttatgcctagtagagttttgaagaattttacaataaacagcatggtaggatgaaaatggcttccccctcaaagatatttacatcctaatcttgaaaccagtgactgttaacttatgtggcaaagaaaaaaagccaggggaaggggtctttgcagatgtgattaatataagacttttgaaatggggagattttcttcgatggtctgcattggacctaatgcaatcacttgtgtttttttttttttttttttctttttgagacggagtcttgctctgtcgcccaggctggagtgcagtggcgcggtctcggctcacggcaagctccgcctcccgggttcacaccattctcctgcctcagcctcccgagtagctgggactacaggcgcccgccaccatgtccggctaattttttgtatttttagtagagacggggtttcaccgtgttagccaggatggtctcgatctcctgacttcgccatccacccgcctcggcctcccaaaatgctgggatcacaggcgtgagccaccgcgcccggcccacttgtgttcttattagaaggaggtatggggaggggattttcttttttcttaatttttatttttattttaagttccggggtacatgtgccaggtgtgcaggtttgttacgttgataatcgtgtgccatggtgggagattttcacacacactgaggagatagaagatggagcagagggaaatttaaagatgcttgccttgaagattggagtgatgcagcgacaagccaagaaatgccaccaaaggctgcaagaggcaagggcagttctccccagagcctctggagggagagagttcttgccaacaccttgatttccggctggggattctggcctttagaactgtgaaagaataaatttctgttgtttaatatcactaaataatggtaatttgttccagcagccacaggaaaataatacaagcaacatcctttaggttgtttggttttatacctatacataaaatattttgagcacatgatccaaaatatgttgactcaaatatttttgcatgacactgtaccaatttatttatgcattataagacacacaaaataaaaattttaaatgaagcactaagaagggaaattaatatctaaaagtaattttatattactaacagtataagaaatcttttactcctaaaaattattgttttacagtgaaagcaatgtgatagaatatgctacattagtttgaaaaatcttagtttaacactttcttaaagatatgcttcaaagtttggcttacttagattatttcattctaacgatgatgtggccaaaaaagatacattttgaggctatgcagattcaaaaagaagtagtacatccttgactatccttactaaatcaggaagttattttattttccaattccatttgcaaattatgcaaataatttttaaaatcacaatcagctaatacacaccttaaccatcttgtcaatcagttgcttttttgaactaatcagatgataccaagtcaatatactttttttgtgtgcgtgtgagacagggtctcactctgttgcccaggctggagtgcagtggcatggtcatggctcactgcagcctcaacctcccaggctcaagtgatcctcctacctcagccctcgctgagtaactgggatgacaggtgcatgtcaccatgcctagctaatttttaatcttttgttgagacagagtctcaccatgttgcccaggctaagtccatatgttttcaacaaatagattcaaacccaattgaatgtctttatttgaaatatttaaaaatagctccaagtttctaaaggaagcagatacgagaatattttaagtgagacatagtgttttctggcaacaagatcacgtaatcatggaaatatttccagacatctgttttcagaatgttctcttttttaagtgattttttgattcattgtaaaacactcctctctcatggaaggaaatact

SEQ ID NO: 367 - DNA, 2511 bp, Homo sapiens
aggtgcaatgtcagtgatgagatgaagggcagtaaagatataagtagcagtgagatgaccaatccctctgatactctgaatattgagacccttctaaatggctctgtaaaacgtgtctctgaaaataatggaaatggtaagaattcatctcatacccatgagttagggacaaagcgtgaaaataagaaaactattttcaaagttaataaagatccatatgtggctgacatggaaaatggcaatattgaaggtattccagaaaggcaaaagggaaaaccgaatgtgacttcaaaggtatcagaaaatcttggttcacatgggaaagagatttcagagagtgagcattgtaagtgtaaagcacttatggatagtttagatgattcaaatactgctggcaaggaatttgtttcccaagatgttagacatcttccaaagaaatgtccaaatcaccaccattttgaaaatcaaagcactgcctctactcccactgagaagtctttctcagaactggctttagaaaccaggtttaacaacagacaagactctgatgcactgaaatcatctgatgatgcaccgagtatggctggaaaatctgctggttgttgcctagcacttgaacaaaacggaacagaggaaaatgcttctatcagcaacatttcctgttgcaactgtgagccagatgttttccatcaaaaagatgccgaagattgttcagtacacaactttgttaaggaaatcattgacatggcttcgacagccctaaaaagtaaatctcaacctgaaaacgaggtggctgctcctacttcattaactcaaatcaaggagaaagtgttggagcattctcaccggcccatccagctgagaaaaggggacttttattcgtacttatctctctcatctcatgacagtgattgtggggaggtcaccaattacatagaagagaaaagcagcactccattgccactagacaccactgactcgggcttagatgacaaggaagatattgaatgcttttttgaggcctgtgttgagggtgactctgatggagaggagccttgtttctctagtgctcctccaaatgaatctgcagttcccagcgaagctgcaatgccactacaagcaacagcatgttcttctgagttcagtgatagttctctttcagctgatgatgcagatacagtggctctttcaagtccttcctctcaggaaagagctgaggttggaaaggaagtgaatggtttgccccaaacttccagtggctgtgcagaaaacttagagtttactccttcaaagcttgacagtgaaaaggaaagttccggaaaaccaggtgaatctggaatgccagaagaacataatgctgcttcagccaaatctaaagttcaagacctctccttgaaggcaaatcagccaacagacaaggccgcattgcatcccagccccaaaactttaacctgtgaagaaaatcttctaaaccttcatgaaaaacgacatagaaatatgcataggtagaatgtaccccctccccaagcatgaaaatcatctcactgaaagatacgcctggctgcaactcaggggtggcctcatcctcccgccctgggctggcctctggttccatcacgtttgtcactgccgtttattacattgacttctcccaagatgaatcttccttccaaatgtgttttctccacacaagccttgtgatctgaatgtgtgcgctggttctctttaggtgatcgtctttgaagttcagcaaagctgcttgttctcccatggattcctgtcccaagctacctctaccaaccctctctctccagctagacttttctctttgcctcctcccttcccttccactctttaaagttctgcagttcaccaactggtagtccattaaattctcctgtctagaatgacccccccaccagtacttgaccaatttcatgtatcaatctggatttttttttaacggtataatgactgtgcttattgaaagagttttacctaaaaagccaacatttgaattggttgcagcatagagaagaaacactggtccttctttcaaaattaagcaactattaaaagcgccattttatttatttcatttaaaaaataatctatgcagcatttcaagaaacaaccatatggtgttgtatattataaactggtgacattctactattgaattatgtacaacattttcattttttatgcttcttgaggtggtaatgagaaaaaagttttttaaaaaagtgtgccttgctgtatttcttataccatttattaaaaagctgctttcacggtaaaattatgttggtttgaaaggaggaaatagcaaggttaagatgtgtgaataatttctgtatatatgtataaccaagtacaaacattgatgtataatgacagtataaaatgctttcatgtttgtgatgtctagtgatgtggaaaatataagccttaaatccattagattgcatggtaattaaaattggcataataaacacagattattggggg

SEQ ID NO: 368 - DNA, 1917 bp, Homo sapiens
atttgactatttggttgcacatggcaggatgaacgaaaaagaagcaagatctaaatttagacagattgtgtctgcagttcaatactgccatcagaaacggatcgtacatcgagacctcaaggctgaaaatctattgttagatgccgatatgaacattaaaatagcagatttcggttttagcaatgaatttactgttggcggtaaactcgacacgttttgtggcagtcctccatacgcagcacctgagctcttccagggcaagaaatatgacgggccagaagtggatgtgtggagtctgggggtcattttatacacactagtcagtggctcacttccctttgatgggcaaaacctaaaggaactgagagagagagtattaagagggaaatacagaattcccttctacatgtctacagactgtgaaaaccttctcaaacgtttcctggtgctaaatccaattaaacgcggcactctagagcaaatcatgaaggacaggtggatcaatgcagggcatgaagaagatgaactcaaaccatttgttgaaccagagctagacatctcagaccaaaaaagaatagatattatggtgggaatgggatattcacaagaagaaattcaagaatctcttagtaagatgaaatacgatgaaatcacagctacatatttgttattggggagaaaatcttcagagctggatgctagtgattccagttctagcagcaatctttcacttgctaaggttaggccgagcagtgatctcaacaacagtactggccagtctcctcaccacaaagtgcagagaagtgtttcttcaagccaaaagcaaagacgctacagtgaccatgctggaccagctattccttctgttgtggcgtatccgaaaaggagtcagaccagcactgcagatagtgacctcaaagaagatggaatttcctcccggaaatcaagtggcagtgctgttggaggaaagggaattgctccagccagtcccatgcttgggaatgcaagtaatcctaataaggcggatattcctgaacgcaagaaaagctccactgtccctagtagtaacacagcatctggtggaatgacacgacgaaatacttatgtttgcagtgagagaactacagctgatagacactcagtgattcagaatggcaaagaaaacagcactattcctgatcagagaactccagttgcttcaacacacagtatcagtagtgcagccaccccagatcgaatccgcttcccaagaggcactgccagtcgtagcactttccacggccagccccgggaacggcgaaccgcaacatataatggccctcctgcctctcccagcctgtcccatgaagccacaccattgtcccagactcgaagccgaggctccactaatctctttagtaaattaacttcaaaactcacaaggagtcgcaatgtatctgctgagcaaaaagatgaaaacaaagaagcaaagcctcgatccctacgcttcacctggagcatgaaaaccactagttcaatggatcccggggacatgatgcgggaaatccgcaaagtgttggacgccaataactgcgactatgagcagagggagcgcttcttgctcttctgcgtccacggagatgggcacgcggagaacctcgtgcagtgggaaatggaagtgtgcaagctgccaagactgtctctgaacggggtccggtttaagcggatatcggggacatccatagccttcaaaaatattgcttccaaaattgccaatgagctaaagctgtaacccagtgattatgatgtaaattaagtagcaattaaagtgttttcctgaacactgatggaaatgtatagaataatatttaggcaataacgtctgcatcttctaaatcatgaaattaaagtctgaggacgagagcacgcctgggagcg

SEQ ID NO: 369 - DNA, 3883 bp, Homo sapiens
gtctccgcctcgccgcagtcggggcagccgctcgcccctcttttccatgtatccgtccaggatcccatgacagattctgttgtcacgtctccttacagagtttgagcggtgctgaactgtcagcaccatctgtccggtcccagcatgccttctgagaccccccaggcagaagtggggcccacaggctgcccccaccgctcagggccacactcggcgaaggggagcctggagaaggggtccccagaggataaggaagccaaggagcccctgtggatccggcccgatgctccgagcaggtgcacctggcagctgggccggcctgcctccgagtccccacatcaccacactgccccggcaaaatctccaaaaatcttgccagatattctgaagaaaatcggggacacccctatagtcagaatcaacaagattgggaagaagttcggcctgaagtgtgagctcttggccaagtgtgagttcttcaacgcgggcgggagcgtgaaggaccgcatcagcctgcggatgattgaggatgctgagcgcgacgggacgctgaagcccggagacacgattatcgagccgacatccgggaacaccgggatcgggctggccctggctgcggcagtgaggggctatcgctgcatcatcgtgatgccagagaagatgagctccgagaaggtggacgtgctgcgggcactgggggctgagattgtgaggacgcccaccaatgccaggttcgactccccggagtcacacgtgggggtggcctggcggctgaagaacgaaatccccaattctcacatcctagaccagtaccgcaacgccagcaaccccctggctcactacgacaccaccgctgatgagatcctgcagcagtgtgatgggaagctggacatgctggtggcttcagtgggcacgggcggcaccatcacgggcattgccaggaagctgaaggagaagtgtcctggatgcaggatcattggggtggatcccgaagggtccatcctcgcagagccggaggagctgaaccagacggagcagacaacctacgaggtggaagggatcggctacgacttcatccccacggtgctggacaggacggtggtggacaagtggttcaagagcaacgatgaggaggcgttcacctttgcccgcatgctgatcgcgcaagaggggctgctgtgcggtggcagtgctggcagcacggtggcggtggccgtgaaggctgcgcaggagctgcaggagggccagcgctgcgtggtcattctgcccgactcaatgcggaactacatgaccaagttcctgagcgacaggtggatgctgcagaatggctttctgaaggaggaggacctcacggagaagaagccctggtggtggcacctccgtgttcaggagctgggcctgtcagccccgctgaccgtgctcccgaccatcacctgtgggcacaccatcgagatcctccgggagaagggcttcgaccaggcgcccgtggtggatgaggcgggggcccagactggttcctgccgcgtgtaggctcgtggcagaggacttccatgtgtggccagagagcgctcctccctggggcagctgagcgtgtgccccaccgtcctgggaggggtgaggtatgagcgctgacccctgcctgcccccgtcccacagggtaatcctgggaatggtgacgcttgggaacatgctctcgtccctgcttgccgggaaggtgcagccgtcagaccaagttggcaaagtcatctacaagcagttcaaacaggtacccagtcacctacaggcagctcaaacagatgcgcagtcacctacaggcagctcaaacaggtgcccggtcacctacacgcagctcaaacaggtgcgcggtcacctacaggcagctcaaacagggtgcccggtcacctacaggcagctcaaacaggtgcgcggtcagctacaggcagctcaagcgggtgcgcggtcacctacaggcagctcaaacagggtgcccggtcacctacaggcagctcaaacaggtgcgcggtcacgtacaggcagctcaaacaggtgccggtcagctacacgcagctcaaacaggtgcccggtcagctacaggcagctcaaacaggtgcgcggtcacctacacgcagttcaaacaggtgcgcagtcacctacacgcggctcaaacaggtactcaggcacttcgggaccccagagggtgccagagtactccagcctcgaaggcgggacaccgcgcttcccgtgtgggggtgctgggtcctcgaccctcaacaccacttaggccgaagctggctgcacccctcaaaccatgaagctgagaagcacccactttacaagtgcagcagccggagaggaggctctcatcagtgcaggctcatccacaccagccgtgttttggggacttaaggaggtcattcgcgctcagaggcttgtcccgggcaccatgcggcgtctgccggggtctttctcctgcccagcttcatttgcctgtgcatgcacttggttatccaacaagagttagaacattttgggagaagcccacggtggctccttgccgggctggtcagactccgtggttgtcttgagacacccaccctctgctgccctgagggtggcccaggaaagtttgtgtgaccttccacacggatcccctgggacatgcaggtgtggctcttgacactggaaaggctgagggttctgcccaaacctaggagtgaattcgacttctttcccatctcacacacacacccgagacgtcacccgaatccacgtatttcccacgttcggctgccactgcctcccgggtgggctttgcaggacccaccatcgcatcccctctcactccacagaaaactcgtggggccatgttccccctgccactgaccacgcttcccttgcagatccgcctcacggacacgctgggcaggctctcgcacatcctggagatggaccacttcgccctggtggtgcacgagcagatccagtgtgagtggggccctgctctgtgcgtggggttctcactggggtcaggccaccaagcctggcctctgccatgggcagcagctgggccccccatcccctgcggggtgttaggggagtgggtggtgccgaccttcagtgacacccagtctttatgcccgggcctcccacatgccctgggctggtgggctgtacctgtgattcctgcagggacccctcatcaggccacactgggtagggccctttgtccagcatgcagaggctcaggagtccaggccccttgcctccggggaggccagcagtcttggggattctcagggacaagcccagaaacatctagaagggtttcaagtcctgaccctggcattcggagggctgctctgaatggaagcctcatgtgggtctcacaggagccactgatgggctgtcctcagagccccgctcccagcaagctcatgaggttttgcaactcctgagcgcatccccgggcgtccccaccacatccccacaggccaggagagtcgctcgcaggttttgggtcatagatggcagccctggcctggggcccacaggaagagttgggaggggccctggagcctggagcctgcccacccaccaggcctgtgtgcagggggtgagcgctcggtggctgaggctggtccgtgagggccccaagtctaaccccatctcccgtccttggctctgcagcgcaggaccaggcctgggcaggcgtggtgggggggcctgcaggtaggtatcacccacccctcagaatggctctcaggctcagattcacagcctccccatggcaaatggaggccttccagggtcctggacccacccccaagcttgggtaggagggatccccctcttaatctcacatttacttgtgtttgaacatctc

SEQ ID NO: 370 - DNA, 2141 bp, Homo sapiens
gtggtttctaaggaatttgaatgatccagatttcaatccagtacaggaaatgatccatttgccaatatataggcatctccgaagatttattttgtcagtgattgtctttggctccattgtcctcctgatgctttggcttcctatacgtataattaagagtgtgctgcctaattttcttccatacaatgtcatgctctacagtgatgctccagtgagtgaactgtccctcgagctgcttctgcttcaggttgtcttgccagcattactcgaacagggacacacgaggcagtggctgaaggggctggtgcgagcgtggactgtgaccgccggatacttgctggatcttcattcttatttattgggagaccaggaagaaaatgaaaacagtgcaaatcaacaagttaacaataatcagcatgctcgaaataacaacgctattcctgtggtgggagaaggccttcatgcagcccaccaagccatactccagcagggagggcctgttggctttcagccttaccgccgacctttaaattttccactcaggatatttctgttgattgtcttcatgtgtataacattactgattgccagcctcatctgccttactttaccagtatttgctggccgttggttaatgtcgttttggacggggactgccaaaatccatgagctctacacagctgcttgtggtctctatgtttgctggctaaccataagggctgtgacggtgatggtggcatggatgcctcagggacgcagagtgatcttccagaaggttaaagagtggtctctcatgatcatgaagactttgatagttgcggtgctgttggctggagttgtccctctccttctggggctcctgtttgagctggtcattgtggctcccctgagggttcccttggatcagactcctcttttttatccatggcaggactgggcacttggaagtcctgcatgccaaaatcattgcagctataacattgatgggtcctcagtggtggttgaaaaactgtaattgaacaggtttacgcaaatggcatccggaacattgaccttcactatattgttcgtaaactggcagctcccgtgatctctgtgctgttgctttccctgtgtgtaccttatgtcatagcttctggtgttgttcctttactaggtgttactgcggaaatgcaaaacttagtccatcggcggatttatccatttttactgatggtcgtggtattgatggcaattttgtccttccaagtccgccagtttaagcgcctttatgaacatattaaaaatgacaagtaccttgtgggtcaacgactcgtgaactacgaacggaaatctggcaaacaaggctcatctccaccacctccacagtcatcccaagaataaagtagttgtctcaacaacttgaccttcccctttacatgtccttttttgtggacttctctctttggagatttttcccagtgatctctcagcgttgtttttaagttaaatgtatttgacttgtgttctcagcattcagagagcagcggtgtaagattctgctgttctccctggatcttctgacattactgctgtctgagatttgtatatgtgtaaatacaagttccttgataccctaaaaccttggattaaacagaatgtgcattgtacatctttaaacaaaatgtatattaatttattaaatctagttgtcactttattttggacctgctgtgatctcgacaggaaacgtgccacagagcagtagtgcgcaggcaagacttttcagtgacgccttgtggaacgcagttcatgatgtcctagcagctctcactaagggaactgtacattctttctttcttggctattcagaccttaccaagaacgttaaaggaaacaagtagaaatcagcagtggagtgtctgtggtaagaaaacatgaactttatgcttcactgttagttgtttgtggaagttattttgtataacaccaaagctgttgtacatttcctactgcctgatttttttcatgtgtctgtgtttgtaatattgtatagtatcttgtgctaggtgaggaaattatttttaattttgataatttaatattcctagtgtgatcagcattgggagttgggtttcagtggggcatgtctatacttagag

SEQ ID NO: 371 - DNA, 3189 bp, Homo sapiens
agattccatacagcttgcagagccaagttaagtaagaagtagattgagattttcatcccaattctgcattcaacaactctgcttcaacacctagtccacatgaggaatgtgttggagagttgaattacattcaacaactggtccaaattcaacctcaagtgcagattattctgttataaaaaaatgagacagtgaaaatccttccattgtccagcttataatagagtccttttagctaagaggactggctgacagaatttggttttgcagggaatttctttaggaggagctattggggaaggtcaggaatggccctatctttagttctccaagaatgacctgggatgggtagggggtgcctccatttcggttggttttgagtgtctatttttcacattagtctttttgatgatccacatgttgcaaaaggaaaatgtaaaaaacacacccctcaaattgctttgtttcagaatgcttttgcacctttgactgatgccaagactaggagccatgttgatgatgtgggtctcgttctttcttcattgcaggctagtatataccgagggggatacaaccgttttgctccatactaaatgacaaaaccataaaaaccttccaatgtggggagaaaggaagctttccgaggcctgagtattgcaatacatgcagtagtacatcattttagcaactctaaaaaaaaaaaaaaatacaaataaaaaggaaaaaaaatgacattttttatcttatacctcagatattttgttctgtgtattttaatattgtgggtctttaatttctgaaggttccgtagtttggttgctggctgtaggagtttttgtggttgatctagacagatgctagataatgaataaaaactggtttagggccatatccagagtgctatattatgtaaatgaattatatatgctgaatattaagctactggggttatcagctgtttgggaagagtgtaagtgactacagtagtcatttttttctgcacctgcattattttattttgtgaaaggggaggttgggaggggcttaggggattggaactggggtttggctgaaagaaaaaaaaaaaaaatgtaactgatgaatctaaacgacccactgcaccaacaatcatttatcaatggttctaagttactcattgccagttcaagccaaaggtcatgttgttaagggggtgcttctagtagcacttgtgcatctgagttgaatgaagctgtgcaaacccaccctttaaaccattccacccggcagtattcagcttcttaaccagtcgctatttaggaaaaaaaacccactagttaggccatcaacaagcattctttttatatttcttccagtataataaattattgatatcattgctgacttttatattatgggagggaaaaaataacattaataaaaaggtgataaaaaagcactgtttctatttttttctttttttccaaaaaaagaaagtaataaaaacttaaattctttgtaccagttaaaaaaaatgtataaaatttacatctgtgcagtggagttgttaagttctagaaacagtctatgaagctttagttttagcctagtagaacaactgttagagacagacgtataatttttatggaattacatgataatcatattcggatttatagaagcattttacaagtattgcaatcattgagtagagataatcatggtattttcatcagcttggtactttttgaaacgtgactgcgttgtgtgaacaatctgcaatttttcagtccgtgagatcctgcccttccacctctttcccatacccccaaggattatctcaaaatgatctctttagttctgtctccaaggcccaggacacttgtcagaaggatgcaaaaaaagaaaaaagtagatccaccctcttaatcccaaaagaacaaagtctccccacctttctcggatgcagggccagagtgacacagccgaaaaattgcagtttgtctgtacttctgtttgaactttccacgttgtcctgtttacaagttaacttaagttggggtatccgtcacgggtcttcctgttttgtatttaaataaaaacaacagcagcaggctgtccctgagtagttttgctgccataggttaagtcctcatgtgtacagtgcaggccctgtggcccgcacttcagtaagttatcaactctcaccgctgtgaacctgccaatccgctgtaacaactctgctttaaaacaaaaccaaacaaaactttaaaaaaaaatgtgtgatccagctttctcttgccatcctatgtgcatgccgtaagatcagttggatattaaaccatcaataaagtttcacaagatttgaaaacaaagtttctgtagcttcgatacctaagacagacgatagtgatcttgaaaagagaaaagggggaggggggagctacttatcagccaaaagcatataaagtgttcttttcaccagacttctttgggtgggtgaggggaggggcaagagggtgttttatagcatcactaagacattctcattcccccacctggaaaacagtgttatggcaatgggtgcctggttgatgttcttaaaggaaacgaattattaaaacactatgacatcctccagagggaagaaagagtaggagcagggggctatggagaataaatttctcccaattgccgcctcagatttcaaaatccagaatttgtattgtgtttcgaatcacaaacatagaattcttactgtgttggttaaagtaaaattcatttgcagttttgattttcatcaatgagctgtactttcccccatgactgtatgtagttttaataaaatcatttagagtgagtgagtgccaaccgatgttgcagaatcttttgtctaggcactccaagatgccaataagtcattttaaaatgtatgtcagagatgtaaacaaacattttggattttttttaaacagtatttatttggaatgttttcatttatctaaataactattgctattatgaattatggaaaattaatattatgtgtggcatatagtgacttcttaacacacacatcacgcaatctgcaaacccagaaaatgtgtatatctgtctttagaaattagtgtttatatcacttacagtggtttgtgaataaagaaaactggtttgtaatatcaaaaaaataaaagcttagtctgaaaagac

SEQ ID NO: 372 - DNA, 2684 bp, Homo sapiens
cacaaaggcacaggggtcttggctccaccctcctacggatgccgagagttttgtgtgaggtcagggcagcccccacttcagggaggaaaaccttcccgggggcccctcccttcccaggcggcccctcccttcccagcgggtcccaccccaagcacagccgaggatggggggccagggggaggtcagcaccagcagccaactgctctcctcactcctctcagaggggctcagcagccatgggtatccccctgccccaggcctcacccctgccccaacaccagcccctcctagtccctagtccctcccattccctccggctccctcccagtgccccccatcgcttcgcagcccctcctgctccctttggctggctgttgcttccttccagcgtctgctcctccgcggcctcatctgcctcttcgtctgttagagcgcgcgtctcgtctcagtcgtcacgtttttggtttttgtggggttttttttttttttttttttgagacagtcctgctgtgtcgcccaggctggagtatagtggctcaagctcagctcactgcaacctccgcctcccaggttcaagcaattctcctgcctcagcctcccaagtagttgggattacaagcacccaccaccatgcccagctaactttttgcatttttaatagagatgaggtttcaccaagttggccaggctggtcttgaactcctgacctcaggtgatctgcccacctcggcctcccaaagtgctgggattacaggtgtaagccaccgtgcccggccatcgtaatgtttgaatttgcttttttacatcttccatccttttggagtgtcttgttccctcgtcatagttcagcactgtgaccaccttggggttagacactatggttttatatcctgtacttgatattctcgagtccaagtctcctgatgctcttctctgctgtcgtgtgcatttttaaaaacgggaagcaaacgttcattggcatctgatctctaaggcccaggtgccagggatgctccagggtgagctgcctgattgtgcaggccagctgaggctcccttgggagggacctgccgaagagaggcagcagcgtggggccgggacagtgacctctcctccacctggagccatggccaggggagctgccccctcccagcaacttcctgcccttgctgcctccagtctgtctcctgcccccaacccccacccctcacccctcgccctctgcgtattgttctggaggacagaagtctgtctggggctgcatgaggaccactgtccttcacttcccgatgttgaaggaggacactgttcccggctttctgggtggtgcggtcagaaggcagcagccctgacaagggggttcccacagcctccctgtggagggagttggcctcctgagacccccatgtgcatctgagaaccatggaggcaagccctctgcagatcttcagccagggtgttgtgtgggtggctccgagggctggaagctgggagggaacagacctcgctgccccacagcaggctggtcctgcccagcaaacacaggagagcctcggccagagagggctgcagcccagggcccccagcagcactctgggccagcagggttgggctcccattagcacagagcagaagggtgccagtttctatggaatttcagatgaacagcacgtaacagtcagtgtgccaaatacacataaatacggcgttctgaaatttagcacactgggaagtccacatggttcatctgaaaacgtgccagatccaggcagccctgacaggcgctcagccaccctgctggggcctgtgtggccacggcaaggccggcacaaatgcatctattcactgttctcagcgaagacaacgtcccggaccccaaggatgtgaaggagaggttcagcggcagcctcgtggccgccctgagtgcgaccgggccgcgcttcctggcgtagttcggctccttcgccacagtgggactgctgtggttcgcccaccactcactcttcctgcatgtgcgcaaggccacgcgggccatggggctgctgaacacgctctcgctggccttcgtgggtggcctcccactagcctaccagcagacctcggccttcgcccggcagccccgcgatgagctggagcgcgtgcgtgtcagctgcaccatcatcttcctggccagcatcttccagctggccatgtggaccacggcgctgctgcaccaggcggagacctgcagccctcggtgtggtttggcggccgggagcatgtgctcatgttcgccaagctggcgctgtacccctgtgccagcctgctggccttcgcctccacctgcctgctgagcaggttcagtgtgggcatcttccacctcatgcagatcgccgtgccctgcgccttcctgttgctgcgcctgctcgtgggcctggccctggccaccctgcgggtcctgcggggcctcgcccggcccgaacaccccccgccagccccacgggccaggacgacccacagtcccagctcctccctgccccgtgctagcagccacagagcccactcccagccgtcctcaccagagatggaccagggaggacaggatgctgggcaggggaagccaagtcacgggcaggccgcagtggttcttgcgtggcctggttttattttcattgtgaaatatcatgctcttatttcagtcctcg

SEQ ID NO: 373 - DNA, 2173 bp, Homo sapiens
  misc_feature 1168,1209: n = a,t,g, or c
ttttttttttttttttttttttttttttttaggatgaaaaagatttatttggaaaaatcatcacaggacaaagatatccttaataatctgtctcagaatacctgaatattcagaagctatatgaaatgtagctggaaattccgatttcacagaacatcagtggtttatacaaattaaactcccataccctcccacccccacatatactactctatctaccccttattgacattagctttcattaattaagcttctatctttagtgctacttgcgcaaattaaaaagcaaaatcattttcatttttaatgataggattagttaaagcaaccaaagcattactgttacagcaaagtttagtaagaccgtaagagaataccactaataacagttttaaattatccaaaatgatttctttattgagattaactacatagatttcacagtactatggaatacttatatttagctaaagtcacaaacacatttcaacattcaaaatgatgagcatcattaccattctaatctacaaagctcatgaataaagaaaaatacaaaaacctcaagttttacaaaaaaaaaaaaacttttaagtctacatacattaacaataaaaccatttcttccagataacaggtaaaagtataaaggcataccactgacttttttttttctagatagccaggaatgaacgaatgtttaatatctacgacgcttattagggccttcaaagttgcccccttgacttcctctaccaaagccaccaggaccaccactcacaggacctacaccactcattggtgcttgaggggtttcagaacctgttctactccccataggtgaacccatctgagatggtggtccttgaggaaatctgtcattgtgcactgctccattatctggcatcattggagttcccatatttgcggctccttctggtcccatggcaggaccaggacccattggtgggccaggtatagttgctctgttgttcatattcatacccatcattggaggaggaccttggttaccagcaggggctgggctaaaacgccatctcccatgtttattgctccacggggacccatatcacccattctcatttcctggttctctattttccaaggtagttttgggcttaaagccctcttgctgtcgcctcagttcatnctgttatctgtgtcggatcatttcttcctaaggccgccgangctcctcttcatgtctaagtggaatttgcttccgtttttgcaactcttggtttctgagttcttcccagcgtctgagttcttcttgacgcctaattagatcttgcctcattagcattaattggtgttcaatgcctagctgcttccatttctgcctccagcttctcttcggcttctctgaggtttctatcaacctgctcacgctgctgctttccatttcatcaagagccttccatcgagatgcatactcaaattcaaatgtcccaggttgagcaaaacgtggtggttgttctctttcctacgatactgtcgagttttcggcatcagcttctctggcaaggcatcttcatcatcaaactgctccatgggttccacaatgactggacgaggggtcgttgttagcaagaatgccccatcaccacatctttccagagcctttcgtgcaggagcttttgctgcaaactctacaaaaccttttcccgtagctctaccgcgatcatccacaaccacgacagctttctctactcgaccaaactgagaaaatgcttgctctagcagctcattggaaacaactggagaaaggttcttgacagtcaaggctgctccatgtgtagcgaagcgaatccgtagaggtctgctcttgagaacggtgccgtccagctctgcttttgcaatttcagccagggttctggattccaagcggatgaagccgaagccacggtcccggttgatgaagacttcgctgggctcgccatagcgttcgaagagcctcttgaagtcctcctccgtgatgtcggtgggcagatttcccacgaagaggcggcagcgctgcgtgtacgtcttctcgcccggcttgaggaaactcttgatgtcgatagtgaaccccatctcctcgtccgggtggtcctctggaggcgcgggcgcgggcggtgccggctccccggcaagagcgagcgccatggctgcc

SEQ ID NO: 374 - DNA, 2545 bp, Homo sapiens
ttttagtgtgacagatctagcaaattctttttatttacataaaatgtgtacacatactttctctgtacacagaaaattctaagtatatatatatagatatatgattcccacatattttacaataaataatattttactcttgtttctaggtgaaaataaaaagatgtttcaaaatattaatcaccaaccacaaaattacaaaaacatgtggtgaactcagagcaagaacttcaagcctgtactaccacacactaagcttagtacaatttttacaaaagacaaaaattgaacactgcagatattaccggtaaaaggaaagaaatgaagatagagaacagagctcttggttttttgaacagtgtggtaagagtatttcttgttgtttaggacttctcttcctttagtcctcaatttaatgttttactttaattaatattttacagataagaagggagaaagaagttaacatctattgtaaaaggagtgaccattccatgagcgtcctgagttctagaagcctttttcttggccaaccagacccctgtttctgttctaatttaatgatcattcagttctaccatataggactgctattcacccccacagggaagatgagaagggcactgactgtgaagtgacattaatttgaaagtcatttcaaaagtctggtaagccaggtatcttggttgtcagcacttaataattagaaatgtttaaatataactctctatttccacatagagtttgatctcttattcaaatattaactaaatgcaaggggaacttaatctgggaggctagaaataatgaatccataatcctgaaatttcctccctctacttcccacttttgttttctattctagtctaggaaacaagcactttcactcaacttcagagctgttctacacatgtgtaaagaatcacactatcgaatgaattgaataaagctctaagctataggatgcatacaaattttgtcattttttgattaattccacagcatttgaatttatcagaagagtctaaaaacatcatgatttttgttatcgttcaacaaacttattctcagatttgctttcccattacatcagtattcaaactcagggggaatcataagaatggtgaccaacacagggctaagtgctcaaatcacattccacgcaactgtagctcagatgataaggaacttggttccactgtggcactgtaacttcacacatgaattttgaaacaaattttacctttttttctctcatatcaataacagcacagatggatgggggaaaagatagaaatataaaaaaaaaggtccaatgtcaaaaacacaattcatctatcaaatacaatcttttcctttaccgcatctgctgtttctgcggtaaccttcccaaacatatttcaaaggcaggctcatttcaagaacaatgtttgtcacatgcataattttgttccttcttgtcacatattgctatcattgatgtttctttcagagaaacaataagatttctagaacttagtcatcttgcatgaaagtgatggtttcataaacagtttaactttttagataaaggtacctacgatagaaagaaacaaatttcacacttaaagatgtctctttttcttttttaaaatttgaaaacctgatagggaactattgttcactgccagaaacaaaagggatcctttatcataaagagctgggcttgtttctttgtcattctaatcaaatacatatgtatccctcatttccaccacagcaggaagatcagccagaagataagtatggggtctcactatggtaattgtagtcagggcacaccttttgcacgagtttataatcaacactgtaaaaggcaatgtaaatgcaaatgaccttgaagggcttggagcacaaccaagacacatggctctgagtctgctcctggtagcagatcttggatgggtcaaagttgcacagggcggtctttttcgcccgatctgttttttcatactcaatgcgacaattgaaagatttggattccttggtctcccaaggtagactggggggaaactcaaattccaccaccttggagggtggtaccaagctcactgaaacattgcccaggcctgttgaattatgtcggaaatacacactgaagttccatttccatggtcaacaattttccctgtgatgaggagattgagtttgacagttttaatgttggaatgaaagtcaccccatccaaacattttcttaaattttcctgtttttactattggcctccgtttagttcttgccaatggctcctgaatctccgtgatgttggccagccaatcccaaaagttttccatgctgtctgcgtacgccatggggccgggcttgggcaccggagactgtttaacaaacaggcgcaggggactgatgatccttgagtgcaccacgttgccgaccaacgtccctggagcatctttgtcttcccaatccagcccctccgtggcatgcaccacttccttactgtcacaaaatagcagcagcagcaagccagggaccaccacgaggggca

SEQ ID NO: 375 - DNA, 1826 bp, Homo sapiens
gtataattgagcaaaacgtgtccagaggacccatggctgcaccccatcaagtcagggcccaggaggactgcctggcatgggtgtgcttggcattgtgcccacagcactgctgtcgtggtacagactggcagttggaaggggccttaagccggctgagaagtttgggcttctgggttgaaatccacggccccggttgaggcctgtgtgctgagtgccagagctggagttttctagcttgtaaatctggagaattaactgatctgaagtgactgggaggggtgagcataaaagccggggaacaggactcccagtggtggtctggttttttttgtgagatgagatgagagctaccacctggaaatgctcattctctgcattcagcctgtctcacatacaggattgtatggccatttcaggtttgggaaagatctacctgctgggagccagtctagtttcctgcaccacctggaacttccaaacccttcactccttcaacagaatgttgaggctgcctcatttgtgccaccaagtacgggaatcttaaagacagaaacagagctcatgaccttttatgggaaagagagaggaaaacaaaacaacttcacaacagcatggcaaggggggatgtggaaccaaggacatgatacagggatgggaaaggagggcatgctcaattctagctggttctttcctttcagataaaaatgagcttttctagttggcatccggcactgcagaaaactaaaagtcatccagccatagctttttccttccctggaaagcctgagactagatcccaaagctcagaatgcctctgagaaccagaatcactcctttgagaggcgctccttgcaggaaaaagagaggctcccagagtggtagcctctcagtgaaaatgcatcctaaaaattcaatgtttataccaggctcatgacactaagatgtgacatctggacacgaggggtcagccacgtggatacatccctcccagattgcatctccaggaatcactctgctagcagaatgggcgccccatcccttactatgctgctcctcctcaaagtgcagcccagaaggacccaggcctttgatgcacattgggtgggtctcccactactttagttgaaatgggagcatgctggagtcggcgttctgttgcttctggtgagaaggacatcccattgacccctggccaccaggtccagtattccatccttccttctgtcccagcctatcgccctccccaccaggcccacccccacaacttctcctcaagggaggttgctcccgcagctggagggcttgcacagaccagcagtcacagaaatcattcttcctgctgtactgggccttaactgcctgcaaatgtccagcactactgcataggatgccagagccaccgaaggaaaacacagccaagtttaataataataaaaggaaaaatctcagcctgcagaactctggttttgacccaccatcggccagatgcacatcttcagggcctgttgagcaccttctgaaaagcagggctcgtaatagactccagcacattccatcagagtcaggaaaactgcggtgagtcccagagaatctagggtgcagggcagggagcaggagtcataaggagtgataacctaaactgtgtgtagtcagcggggagggtcttatgttatcaggtgaaatgagagccagtaagttagttgatcctgtcacagatataaccctgataacaccccatagatacgcgacacgtgtgtcctgcccctgctttccccatccaacatggttcttctgttccacagacattaaaggggctttctgcaatt

SEQ ID NO: 376 - DNA, 1250 bp, Homo sapiens
  misc_feature 1098,1219: n = a,t,g, or c
ggcccccacgtctgcctgggggcctcaaattcagtcctgggggtcccggacgcctcccaggggtcttcatgtctgccgtgggcctcgagtccagccgtgagggtcccgaatgctgccttggagggtggagtccagctctgagggtcctgaagtcagctttgggggttcgaacccatccatcccaggggtccctgagtctacattaggggctggagtccagccttgagggtctccactgctgccttgggggcctggatgggatccagcgggtctgagtccagcctcgggagcccctgcggtggagctctgagatggcgcaggggcctggagagatgccaggaggatgagagcggcgcccccctggtccaggggacagtaagaggcagccggtctcagagaagctaccccaaaactgttacccgtggtgtgcagagcgtcctgcaaccccagccctcaccaggatttcttgcgtttttcaggaaatcggttgtgattggcatgttccttaagcgtctgcaggaagccgaggcctttttggtatttcaggaggggttgctaacccccctccttgtaggatcggggtatctcagctgctaattcccctcctaacagccctgcagcgcctggattggaggtgtgacaggtggcatttttggcccgaagtctctaggcaggacgggtggctgtagcctgcgcgtttgtgtaaattaacctccctttttagttctgtgaagggagaacgtgattagtttaaaatcacctgcgtgaaagaggctcttgattagtttaaaatcacccacgtgaaaggggctcttgattagcttaaaatcacctgggtgtttcgttttatctcagttggcctctgaatgtttatcctacagcttcctgcaagctccagtctaccttctaagggaataacggggctcgtctttctacgttactttatgtgggagtagttgttaaacagaatgagggagaccgcggggattgtgcggaaatgtagccaccgtttacatgtctggaggctgaggtgggaggattgcttgagcccaggagtttgacaccagcatgggcaatatggtaagaccccattatctnccaaaaaaaaaaaaaaaaaagaaaagaaaaattagccgggcgtggtggtgggtgcctgtggtcccacctgctccggaccctgaagtgggaggattgcttgagcccaagaatttgacaccancatgggcaatatggtaaaccccattatctat

SEQ ID NO: 377 - DNA, 2348 bp, Homo sapiens
gatgtttcatagaaatttgatttgtgacttgttactttatattataaactagaaatttgctaatacattcaaagctgtgttcaaatagatttctccaagaagcccttctcttttctattctgctagccaataaccaaacataattttgcattattgcccctcaggtttattgtctggactttcaggtgacacggctttctaatgaatggtgactgaaagtcaaggcaataaaattaggggcaatgggatctaggaactgtgtgtgggtttccaggctgtgcattaggtagagagacaccctgtggtctttgtgtacattacaggacaacttgggcaaaacttgatctgcttgggctggtttcagaggtgcatggacttttcaccaaaacactttaatgatcctctgtaaatactcttatctaacagatgaagaaactgaggccgaggtctgcaggtgctcaccgggttagcaatcctctcagagttagcacttgaatgcaggtctccaaactttctgttcagagccctttccaatatattaccttgctcctctgtaatgtacttccatataaatctccaatttatcaattgaacagtatatttgaagaatatttcacttttaaggaatatttttagttctcgacatgtggggttattattgaaatcaggtctcaaagatgcaaacattgcagcgtttttgaggccccgtatctcagtgttgacagaaaatttgcctcttttgggaattgcaagcttgaaggtctgaaaacctaataatctcccataaatttcctccttccttcaaagttagtcactgtaataacctgacaacaatctgtctgaaaacagctgccaagttaaaaattaatctcctgccaaaatgtcatttttttaaactgctaatgataagcatatttaaataattctgtttgcaaatcccttcagagaagccactacaaaatatacatcccaggccagatatgggtatcatgattagctacaagcaattcttcaaaccatagttatacctaacaagtgctaactagtctacatctgggccacagatattctagattactatgtaacatagcatggggaaacagcgtttgcagctcttacaacctcagcttaatcttttaagtattgtgactgactgcactatatatgggacttttgttatgtaaataaagtgggtgcctacaactgacttgttttcagtagggtatctagaagaggctttccttctggccaagccaaagcttggaattaaactgatattttggtcctctttcctcagattatggctaaggagtatagtttaagatcactgtaaatggtgtgagaccagtgcataactctaggtatgggcaaatcctgttgtatgagtagccacagaggtcgtcatgctgcacagtgatttcagaggtactggaaggctcacctggctataaaagtatcctgagacattaaaaagattgaagatgaatgtctgtgtgtttttttaaaaaataaagaatcctgatagaataggttcaatggtgtcagtcatttagaccttagtgcaaattagtttaacaggattgtcaggaatgtaggttgtgcaagaggaggaaaaagtcatggcagggatatgagcttcactggttatatgccatgggtaaaaagaggaggatgacaaaagaatgaataaggaagacttttctacagaggactttataatattgaattattttgggtttttaaaaaaattcatggtggtcttcaaagacatcttagacaaatcaaatagtaaataataaataacaaaaccaagccataccctgttggggtatagtggaaggtttggggattctttgcagatttatttaatccacttatacagttttactgtgggccagagaagatgctgatctttaaataaccttactacttctttcttggcaccatatatcatccccttttctgttcagtatccttaggaatgtaacctgtcaccaggggacaacttgacaatatgctgactttcaaaatcatttattcattcactcagtgcatatttatagactatccattgtgtataaggagttagtcaagctgtatctgtacatgcagtttctgatagaaggttcatttgagaccccatcaaagcccgaggatttcactgtgtgtttggtggtccacttggcccagtggtgtatcccagccccagaagcttgatgtcaacactttgggccctcatgtgctatagccactttcagccgagagtgtgtatttagaataaaggatgacttggccaccggactttattagatttcttaccacaaaagtcctttctgtaaaataaagac

SEQ ID NO: 378 - DNA, 1860 bp, Homo sapiens
aattgttatataaatctggatgagctagggaggcccaggtggatgttttcattcgcaaatcatgagaaacttaagtgggttttatgcacttgatagagttggcaaaattgaactatgaagttaactatttaactcaaggaatgggcggcaaacccatcccctcgattgataaagaaggggaacatttttacattagaactgacactgaaaacatagctttttcagtccaccctggttgctctagtagcccacagcccaatcacgttaaggttctttgctgtgggaattttaaataaaccaaaccccaaagcagaccatctgtaagctttggtctgcttgtttctgagaagggttttatttcattatactaatagtggactaataattggtaattgtgagaacttaggtatgataacattgtttgaagtaaaatatgatttgggggcagcagctttctaaataccaactctgtttgacaaatgttttgaaaattaaaatttcaagtgagcaacaccctgttaagagttttcactatagttgaggcagctactttatgaataagaccactttgggttatttaagcagaagcgtttctttttttttttttggaatggggtgggatgaggagtgagttgccagacctttgattagtttgctggtttagaaacagccagtggctgaattagtgagtaaatgaatgaaagtataaaggacttgttttttatgatagattttctgtaagaatcttaaatgttccttttcaaattagatgtgttgatgcacacatgactattctgtttttctcactgactatataacattaaaaaggggttaaagaaaacaaaactctgccttttgtgctatgaaatatttttagtccagaggttttaagctgtgtgtccattcctactctgaaaatgcatagctttgttctggatgtcatctcttgaaagtagaaaactcctatgtgtttatcacattgcagggctttcttatgtatttctggcagacttgcccaaatctttagatgggctgggttatacagcatgccctcccccaaataagggatctgaaataaatactacactattgatagtggagatatattaatttttaaaactgtaaagtaaatgtggtctctaggtttgtggtgtgtacctttgtgttaatgtgtagggaagagacagtgacttgatggttatggggagtgtatcttgatgtgtgtataggggtaagtattgctaaattatttacagcttttattcagggtgagtcatgtgatgaatggcctaatcagaaaagtgaaggagcgaagatgcaagcttgccaaatgatgaaatgaacaagattttgtatctattttttatcaggtgttgtaaaatttgtgcatggctttttgttgttgttgcttagtaactggtagaggagaaaagatgaggaaagaaactcagctttcctcacagtcttttcaaaggtacacagttggggagtaaaatctgactggcctaatcgatggaaaagaccctgtccttttcaccccatcctgcaatcctccgtgcagaggaactacactgttgtattctagtaattcactgtgatttataacaaaccggtgatgtcattctattgtgcacttttgtcaaaccatttatgtgactttaataaacatagtaaacttgctgactgcaccagaggtccattagtgatttatatattgcatgacattttctatttgagtttgacatgtagagtcatttttagtttcatggcaatagacagtcctaataactcagctaatttgaaactaacaatcttgctgtgtaaaaggaaaaaatggtgtttgtgttcagtaaatgttcg

SEQ ID NO: 379 - DNA, 2083 bp, Homo sapiens
tttaaaatttagcaaacagagttcttcaagtgcaaattgttaagaaagagaggcatacattctttctaagtggcttggtggttgtacttgattattatggactggatgtggactagataataagatataaaattgacaagagataccatggcctgataatggtactcattttttatgtgtatgcataatttaagctatgtttttcactcatatgttctaatcactttgcattttttctcctgtactgtgtgggatttgagagtcgaggtgaaaggaagaaccccacaaagagattgttcttaaaggcatgttagggtcctttgggttaattatacaaggtttgctgacagcgcctgataagaccgttgaggtcattctgttgtcgacgtctcttcaatctcaatacgccactcagcaaaggccaaggcagatagagcttttccactatctttatagcacaaaatgctacgctgaagagagaagacacacactctctctctcattcttacacccacacaaaacctgagaagcccaaactgccacacactttgttgatgacaaggtcagcatgataccttagaaccattcatttctttccactccacttcactttcaatatgcaattttaaacatcataatttttaccaccagaatgtgacaaaaaatgtctgctaattgctttgtgtccaaaaaagaaaccaaaagaaaatggtattttgctttagacactaacaaaatgtaaagggtaaatgaagctatgtcttagtagtatggcagaggcagaggagcagggcaagaaacggtatgtaagacacgaactagtcactagtctcacagttctactgaaaagtgagctttatctagttgatgacatcatgcagccccatgaataataaatgaaacatatttattgagtgcttattaagacctccgcaaagctctgcctctgtataaatgagtgagatgaaagcactgttctcacaggaaggttataaaggagctgggggaaacattaatgcaagacacagatcataagagagaaacttcatagtaaaaacgataaagaacacatgagttcttccagagcaggggtccccaacccctgggccgtggacctggtacctgtagtggcctgttaggaaccaggctgcacagcaggaggtgagcagcggtgagccaggaaagcttcatctgtatttacagccgctccccattgctcacattaccacctgagcttggcctcctgtcagatcgtctgtggcattagagtctcacaggagagtgaatcctattgtcaactgtgcatgcaaatgagctgggttgtgtattccttgtaagaatgtaactggctgggtgccatggctcatgcctataatcccagcactttgggaggctaaggtgggtggatcatttgaggtcgggagttcaagatcagcctgaccagcatggtgaaaccctgtctctactaaaaatacacaaattggctgggagtgattgtgcatgcctgtaatcccagtactcgggaggctgaggcaggagaagtgcttgggcccgggaggcaaaggttgcagtgagcagagatcactgctctccagcctgggtgacagaagatcactgctctccagcttgggtgacagagcaagactcggtccaagggaaaaaaaaagaaaaagagagacagagagaatctaactaatgcctgatgatctaacgtggacagttccatcctgaaatatttaccctacacccaagtttcatgggaaacccatccctgctgccaaaaatggatgggggctgctgctccagaggaccgatagtgcatgaccattaatctgtgtcatgggagaataaggttttttgtttgattgttttttattgttttttattttatttttttttggagcccccttctgggcaagaaagaaagggatcgatgaaaaatatgcctcctatacagaaccaagactaaaagggtcgaggtggaataaaatgttcctatagttcgtaagcatccgtagtttggagtgctttggcatgtatcaatggaaagccaggatagtgtggttaggaatccatactctgt

SEQ ID NO: 380 - DNA, 626 bp, Homo sapiens
atttgaaacattattcttgttgttgttggtaatagcataatgacagtgggaggggtacaaggggataagaaaaatgtcatgatttttttccggtcctgccacatgtaacacttactctgttacctaaattttatagttagatcatatccaatctacttattaaactgtgttctatttaccagtggagtttttctgcagtggttgcgtttcactgtaaggataatggagttcctctcctctgctttcctcagaggatggtcctttaacatagccagaaacaagccctgtggtttgaaggtgagctgtgaggatgggactaattgatatgcaccagtttacaaagacagtcttatcatccgagaatacaccatctttttctctggataattatttcttacatcatgcttgattcctacattttgttgggtctcaacattggctcacgaatggctgttaatatttattctgtattgataaaaagtctgtcttgccactacaagtaaatcccccatttaatattttcttctttagcatagcactgtcattttttgtgaaaatggttatgtttatttattacaatactgagtcatatataaattttcaataaaagcagaaactttcttacc

SEQ ID NO: 381 - DNA, 508 bp, Homo sapiens
gttcttttgttttctagaattaagtctgctcacctggtttgcattctgcatctgcctttctttagtgcagggtagtgtcagtcccactgtggcccaaagtttgcattctgcgttaaccaagtcacaattaatgaggttttactataggcacaaatgcttaaaaaagaaaaaaacgattgttttgtgtggttaaaataaaaacttgtggggattttaatgtatttctttggtgaaaatacattagttgtttgtctctaattggatcactttcccttctagactctgaacaggaagtgcctcctggaaccacagagtcggttcagtctgtggattactactgtgatagtaagttcatacacgatcttttggtcttcatgttaaaaattgacctcagttgtcaggagatggagaccatcctggctaacacggtgaaaccctgtttctactaaaaatacaaaaaattagctgggtgtggtggcacacacctgtaatcccagctactccgtct

SEQ ID NO: 382 - DNA, 707 bp, Homo sapiens
gtgagtttataagagaatttcactaaaaaactacttgtttgtgaaattctcttataaactcactgcatccacatggaacagataaaactaattaggcagctaatggatataggtagtgttaaaaaagaatttcacaaacaagtagttttttagtgaacttaaaataaacagaattttaaaggagacctatttttatactcaataaaagcacaaaagtgcagaaagtataaaacggcttacaaagggagacacaagctcataatgttccatgtataaaagtaataactttattggggtagagatattcttacaagatctagcacctctgccagtgcacagataggactgttttaaatgatttgggaacttttggttgcctgcagttgtgaacagagaacttctctacagagaaacaaaccactaaaagcaatatgaccgagttgagatgtggtttccaatggagcaattggtggaatttaagcaacctggatgtgcatatgtggaggctcccgtctcactgtttgatcaaacttcttttatgtagtcacgtagacttgattttttctgctgtgaaaatgaaaaataaagcaatatgacaaaaagtttaaaaattcataaaaaaaaggatttcctctaggctcctcgaagagatttttttaatagagatgcttgtcttactttctaagacacgttacatttccccttcc

SEQ ID NO: 383 - DNA, 1694 bp, Homo sapiens
  misc_feature 1378,1379: n = a,t,g, or c
attttgattcagaataaaaatacaaaaattagccaggcctggtggcgggtacctgtaatcccagatactccgcaagctaaggcaggagaatcgcttgaacccaggaggcggaggtttcagtgagccgagatcaagctacagcactttagcctgggcaataagagtgaaacttcatcttgaaaaaaataaaattttaaaatcctgatttttttttttaataactctgaacaagtttctttaactctctgcctcaatttacttacttgcataatagtaacgacatggtacctaccatgagggtggttgtgatgattaagcaagataaggcttgtaaaggccttacttcagggactacaaaagtgcgtaaaacatggttccagctgggcgtgatggctcgcgtctgtaatctcagcactttgggaggccaaggcgggcggatggcctgatgtcaggagtttgagaccagcctgaccaatgtggtgaaaccctgtctgtactaaaagtacaaaattagccagatgtggtggtgtatgcctgcaattccagctacttgggaggctgaggcacgagaattgcttggacccgggaggcggaggttgcagtgagccgagattgcgtcactgtactccagcctgggcgacaagagcgaaactctgtctccaaaaaaaaaaataaaacatggttcctgccctcagggagtttacagcttacagagggatataataaaaccagacagataaggaattagaagggattgtgctaagacagggacaaacacaaaatgctctagaagcacagaatagggggacctacccaatttgaggaggtggaggaaggacaggaaaatcctgtcacagaaaatagcttctaagctgagatctgatgaagtagaagaatttattcaggtaaaggggttagatcgggaaaggggtcttctgggtagaaagaactatgtaaagtgattcagagttattacattctgcaaactgggaataattcacagtaactgtagtaagcatccaaggggcaaggccaagctgggtgtagtggcaggtgcctgtaatcccagttactcaagaggctgagacaggagaatcgcttgaatccgggaggcggaggttgcagtgggccgagttagccccattgcactccagcctgggcgacagagtgagactccgtctcaaaaaataataaatgaagtaacaatggtgaagtttgaagtaactcaggtgaagtaacacctaagtggaaattccatactccactcagtaaaccattatcttgggctagttgaattgtaagacactttattttgttgctacaatatttcaggtgagagatgattaggaaccaaggaaggtaatgacattgggtatanngaagagtagacagggctgggcatggtgctcacgcctgtgatcccagcactttgggagaccgagatgggggggatcacctgaggttgggaattcaagaccagcctggccaacatggtgaaaccccatctctaccaaaaattgtaaaaattagccgggcgtggtggcgggtgcctgtagtcccagctactcgggaggctgagacaggagaatcgcttagcccaggaggtggaggttgcagtgagccaagatcgcaccattgcactccagcctgggcgacatgagcaagactccatctcaagaaaaaactcaaacacc

SEQ ID NO: 384 - DNA, 2928 bp, Homo sapiens
  misc_feature 2891: n = a,t,g, or c
catgttttgcagaacttctgccaactttgggatagcttacccccttcctatttgggaaaggttttattgcttgtagacccctcagaaggcagggtagggtgtacgtgggctgttctccccatctcagcctgggtcatgaacaaatgggcagttgtttggcctgaatctcggggcaagttggggagagcacatagaaagactctgtgagtgatttggggagtgggatagctttgaccttggagagaggagagccattggttttcagcctaagccagctcttttatgttttgcttctgggacttgtccctggaaatgtgtgagcttctggcctctattctgattttcttgtgcctcatgagttacatacgacgtcctgcgcttcatattttgtggtgtctctcctgatactatgaaggtggtttgtaattgacatggctttgactctacatattacatacaggttgggagcacccttttacaagggaggataaacaagatttcatcttggtgggtcaacttctaatatttgatggtggctacactgtggacaagaaaggtttttgagcttgttgggggtcagtggatgggcacaagggcacccagtggtggtacccgggccaggtttttgttacttgtctttttaagttgaaaattcaccgtactgtgcatgaaaatggaactgaaaatggaagagaccatgcctgggcaacatggcaaaaccccatctctacaaaaaaattacaaaagattagccagggatggtggggcatgcagtagtcccagctgcttaggaggctgaggtgggagaatcacctgagcctgtgaggttgaggctgcagtgagctatgaccacaccactgcactctaacctgggtgacggagtgagaccctgtctcaaaagaataaaatgttttttaactcaaatgggcagagtttgggctgtgcttatgcagtggccatttgaaccgcacagtcacgaatgtggggttttaaactcgagtgatgaaggcacaagtgcttgcaggctgccattttgagagggaaacagccacacatgtcatcatgttaaactgtcagtgtttcaagctattctgcttgaattttgaagacacctggatcttttttttttttaacatttcaaaataagcatggcaggcttctattgaggtttggacttctctcatttctaaagaattagagttgtaacttcatattagttgtaagtttggggtttggtcctcacccaagttggaaagctgtttgcttaagacatagatgtattataataatagaagggagggagtagaaagctgatgaacccttgttacttatagcaaacttcctgctgttttaaatgcacagagattattttatcaactgtggttagcacgcaattggtatttttatcgttctgccattttattgaggctatcaagtgggacttcagacctggctctgagcaggaccacacgtgtgtatttatattgagtgccctcactcatgataaggtgacttcatggagacccagaaactcaccctcaggggtgttcacctttgaggtgggcatccagatgctgaggggaagtggggtccatcctctgaggtccaggggcctactttgtgagctcagttgtgttcacctgtggttcagtgtacctcggcccctaagccaagtgatcgttcagtgacttgcagcaatgtgggaagtgaggggacccctgccacaccccccaccaccccctgtagagtcactgaccttcatccttcaccctggtcctccatggtgcagcagcatctcatgggccttgtggctgtcagagcccgtggttggaaccccgtccactggtcccaaacctggaggggcagctgcagatgaggtttagacctcctggtgtctccgtggattctgagtgcccagaaggggaggggagggggtggcatcctggcctctaggataaatgcctggagtatagggcagcgccacgggcacttggagaccctgtcctgcgcatctgccaagcctggcagtttttagagttttttgaaatgttttgatactttttgatacaatttgctaataactgttttgtagaatgcctgccggggttttccacctcatccctttcctccggccccttgatttgtgctggacaacaaatggcagcaccaggacctcgcctcatgtggctttgtcttggatcttgcccttctccatcgctgatgtgatacagctctagaatttcgtgaagttgcatgcaaagttgcatgcagcccgtgtgtatgactgtctcagtcccccagctcatttgccaagaggaaaccttaacccccctgagagggtctgcgtttcttctagagctcctacctcagtggtgtgcacagagttggagacacctgagggctggtccacgtctcacctttgccatacgggtcatttcttgatcaaatatatgactggggtcctggtttactcccgcccaccctttcttttaaagtattcttaacatgaaatccacaaaagcggaaacaatgaaccattcttgcactttacagaatcattgtccttagctttagaggttgttaatttcttgtttttaacatgaacagaatgtgtggttctgaaggtgtgtgggggtctcaagaaattgtcctttggggccgggcgcagtgctcacgcctgtacccccagcactctgggagcccacgggggacggatcacctgaggtcaagagtttgagaccaccctgaccaacatggtgaaaccccgtctctactaaaatacaaaaattaggcagtcgtggtcgcctgtaatctcagctcttccggaggctgaggcaggagaagcgcttgaacccaggaggcagaggttgcagtgagccgaggttgcgccnctgcactccagcctgggtgaccgagtaagactgtctc

SEQ ID NO: 385 - DNA, 594 bp, Homo sapiens
cgctcctgctgctcctctcctctcggggcggcggcggcgggggcgccggcggctgcggggcgctgactgccggctgcttccctgggctgggcgtcagccgccaccggcagcagcagcaccaccggacggtctttcactaccattcctacagtgattggcaagataccgtttctacctcactctccatgtaccatgccagtgacatcttagctgctagagtgtggagctggcctgtgggagtcaagtattggtgatgtgacctgttcacgcaggggaaacttgaacattcgcagtcatgcactgcaaaacgacattggagactgggcctggtggctcacgccggtaatcccagcactttgggaggccgaggcgggtggatcacgacatcaggagatcgagaccatcctggctaagacggtgaagccctgtctctactaaaaataccaaaaattggtcgggcgtggtggcgggcgcctgtggtcccggctactggggaggctgaggcgggagaatggcgtgaacccgggaggcggagcttgtagtgagccgagatcactgccctccagcctgggcgacagagcaagactccgtctc

SEQ ID NO: 386 - DNA, 279 bp, Homo sapiens
gttctttgaggaaaagaaatctctaaatgcaactccttgctggattcctcacccatcatcctgttggaaacccttactagacctatgtatttagggagttttgtcagaaaacatttttaacttgcagtatttaaaagaatatttactgttcctaaaatgtcattcaaatgcatgtactgtctattgtttggggatgggaactagttttgcaaaaaacacctaatgttgtataataatgccccaatgatcttgctggttaaaaatacagtatttttggtc

SEQ ID NO: 387 - DNA, 2001 bp, Homo sapiens
ttttttttttttttttttgctgactcgatggcctggctcttgttgaagtctttcacagatgcacaaactgcctttctggtggtgctttccagcttctggaggtgcttggctgtctcgtcaaactgcagccttgtctctgtgtagagggcctctgcgcatttttgttcagcacgggcgttcttccattccctttgctgctgcaaagaccattctctgttttgttcctcttggaatttcttcctctcatggaagtttaaatcctctcccatgaatttctgcattcctgatattgtattccgaacatcattatctgactgccgggctggaagatctttcttaagggctagggggtcggacagatcaaattcacggcgagtttctggcttctgaaagctctgttggaagtcattgatagccctacagagatttttcctatccctctttttccggttttccaatatgcacatgattttgtcattttgcctcatttcagcagcaaaggtttcatgtctagctttttcagtaacttcttttatcttctggtcatgaacttgaacatcccaggcttcagtgtctccccattggtgtcactcagtgcttcattcctccagcagctagtccacacatgtgaaatgttgcccaccagggaacctcactaaagactcaatgtgcagcgtttttatcgggagattgtcacataggcaccgtttgcctatcatgtacccaagttccagaatcttcttaggccagaccttcctcaaaagaaattataaaataatattccagaatcccagccttcagggccacatgcccatgtggctctcttggtgtatgtgacggtttcgcaatcagagatccacgtggagttctccatacattcctcttcgtttgggcactgtggttacagaaggctagttttcaagttgcaggttttactgtaaagatttcaagaccctccagcatcatcagtatctgattgtgtgcgtttttttgaaacttcaattccattctcttctaacttcctctttgcacagtcctggcatgcattacccaataatgtggtgctgtccacgcgatcagcatctgggctttgctgtttgcagatctgagtggcaaggtcttgcacatatcctggaaagtggtcaaaacagtccccgtaggatacaactttgattccgtgcagaagcatatctgcctgatgcttaaagaaatggtcttcattctccttcagcacaagcatgtagtgctccaaatccaccatgacttctgcgtcttgagtgacgtctttataccccgatgggtccagcaccaccccgcaggggtccgtgtagaggccgtgaatgtggaggacgccgtacttcatgtgccctcttgcccattcaaggaccttggtcttgtccttcaagtccagggactccatgggcttgttctgccgccggccaaaggcctccagcaggttgtcatagttggtggtcaggaccatggcgcctctgtccatcaggctgaggatcgactgcagcaccagaggactccggatgtgctgctccaggtcgtcaaacacctccatcaggcagtcctggaagaagctgggcttggcatcgcctgtgcgaggtgacatcttccggatcagatcatgggcgacaaccaacaggtcccggtcctttgtcactttcctccggaactcggcgacgtctccggggtgcagcacctccagctgctctgcagcctcgatgacggcctcgatgcagcttctccacgagcaaaggggagggattccgggggccactgctgcgctgacgccagtcccgataaccaggagcagttcctggggctgtttccggatgaggctttttaaaaactttctggatttttgttcacttctatttgttgtcttttccactgaatccatctgtgaattctgcggcgcctccgagacgctggtcccagctcgcgctgccacctcttcgcctccgcagccggctacgcctccggggtctctcg

SEQ ID NO: 388 - DNA, 1605 bp, Homo sapiens
agaaaattcagttgagctgaatgtccctcttcccaactcctgcggtcacccaagatttagggtcaccgttttccatagctgtgtaccaaagatctgtggtcacggctttcgctggttatatgtgccgtgcctacattggccctaggtctgtattatgtgatgtgcatgatacaaatatcacttctgtgtctaatatctgggaacctgagggttgtgtcgtgccagggcgtgtccactgggcacaggaggacaggctgttagtgcacagaccctggagcccaaggctacggcgatgagttcagatcaggttatttgtacagatcgcacaagttgcgttgagaaaagtcaaggcaattgcagttatgatgcattttgcatcccttttttgatgtggtagttgactaaagatgactcttctgggctgaggcagaagaatcagttgaaccgggaaggcggaggttgcagtgagccgagattgtgccactgcactccaggcagcagagtgagagactccgtgtcaaaaaaaaaaaagagaagaaaccactgagaagggaacaaatgaaaagtaatgaaagaaaggtgcaaatgaaaaggctgtccctttctcctgtgcccctgttcccagccaggtccccagaagtagttgctgtttctggttttaatttttttatgcttatcactgtagctctaactagggtatgaactcaacacggccagagttgccctcccacgcctgtctccccctcccacctctcgaaatggatcagtccactttcgtttcacattattggggcttatgagacttaggtctgtcctgtaaccttaagtgcttttattatcattttccttgctttagagatgggttagctataaagattaaaaacatgtaaatatatacttctctgggtggtggttacctggcagttattaagatatgttataccttcaaaaagtcagtcaaaaatcagcgaatagcgtttgcagtattataggtaactgttgttcagtataggaccagacagcatttggatccacagaagaaaaagatccagtttgacgtttttggttttcgttaatcagtgtgtaggtaacactaaaaacattgtacaagtaataagcttgacagattcgtgatttcccttgctagaaaaagaaacgaaggagtgaagttatagtccctgccgtaaggaatcagggacagttcaggtcatggcagtgtgctgtgagggcatgagcaaggtgttccctggggaggacgtgccagtctctctgtctgagctcagcactccaggctcctgtctctggggagggaggtcccatcaggtggtgtgggttccagaacagtcactggacaggggagagtgcatgctatgcttggagcaggatgaggacacccccggaggcaggggataggcaggcagggttcgggtggaatgcattgtccagcagggcttgtgggccattgccgtggtgtgggtggcatcccatgagcctggctgaggagcagttttcttttgtagtttaggctcccagcattgtgactgtccgcatcatcttttaccttgtcttgctgggaggcttttgtcccccaaagacaccccccac

SEQ ID NO: 389 - DNA, 493 bp, Homo sapiens
gtcaggattacgtgggcgtcattttcctccttacaggcaggcggtgcctctcccttcaaaagcaagggacctttatgcatgattccacatctgcattccgataggaaagggaaacagcagaaacacaatacccatctgagagctacgcttagagaggactctgggcttttatttatttttttacttcagtcttgtgaccagtaattttaagggaaagccaataataatgtttttaaaaagcctcacgccacccctggcggcatctcctcggtgtactttgctgttcagatccgcctgccttctgtgccagcctaacagcgcccggcctcagcccccattgtccctggagctggcgaggtgtccggttgcggagccggcggcgtctctggaaatgcatcctgcatccccgcatggataacagctgcagctatgtcagaattgcacaaagaggggagagtgtcattgtgtgccttttgacacatacattaagacc

SEQ ID NO: 390 - DNA, 2206 bp, Homo sapiens
ttcagttcaattcaaagaaaacaaactctcattacttagtgtaaactaaaatacttaacaaattatatcctaaaaacaaggtctctttgttaaatgttgcatgccctaggttttaaattactacatccaaatacagttttcgtcttaaatttgttaagctaaatatatgttggttctttttattttggaatcctttaagcatcttaaacattttttttttgaagagaagttacaaataacatttctatcaggtagtacttgtatgaaaccacctttcttattctataattttgatttttcaattttatatacttaatatactcactgtcttactatcagaaagttattttgaccaagatttttattatcttcatagattcagaaagagatgctaattctgtaccaatgtcttcctggttactattctcttcctctaatatatactggccatttgtaaaaccattgtgttgttgggatcacttagttatactatacgcagatagagcatctcaactctgtcatagtgtttgctgaacagttttcagtgtcatgcacctttggctgctaattgttcctgacgtgcactcttccgagttggtaaaggcacagtgtgttcatgccagacttctaagagaaacaccagcctcttaaatcagaagcctacacacaacccccttaacaatccaaagaagcttgatggtgtgcaaagaagcatcctgccagccttgtcattgttctgttctatgctaatcctgctgtgttgtctaaaagatggagggaagaggacatcagtgtctgatagtgaaatcatcagcaggaaagtgaagctctttccttggttacagataagacttggtttacactattggccagtatctgctaaacatatgaagacttaactattcagtgttgcctaggcattcgcctgcacaacattttgaggttagaacatagaatattttcagaaatactgttgtagtttgtgagtgttgttcattagttacacattagctatagagtggatgcatgaagccccatgacaccagtaaacttctcttaccagtaggtaaaccaaacaccattctgtcattagcagccctcttaaatgttgcctctccgtatcctgttgcatttttgtgtgcattgtgtttctactgatctctcttaggtttttacggaatcaaaggaaactaatttttccttaatagcaagaaagatgaagaggtaaagggcattgaagcagaaatgtatagtttggggtacgattagaaaactcgtaaggaaaacagaagtcctaatttcaaactgactgctcttcgttaagtgctcttaaggagagtctagtaacagtaacactttctggccatttctagtttagattctcttcgttactgaaacttttgagaaatattacctgtggattaattttgcacaatgttctattctcataatgacttacaaattaaactaggtttttattgaactacctcacactaattttctatgctttcccaagtaagctgttgccctgttagatctttactgagtgaattataaatgtgtgttaaatactttctagccaatgttgacacaataccagtaagtatgtaaagtatataccttacatcagtaagagacacgtgtaaaatctttgactgtatgtcttgcaaaattgtgctcgttgacattattactgtttttgtaagtagaaaccctgctcgtgatatcggtccatttacattttacaaaaggagtaaatcttagtaaaaattttacgaagaaataaattacttttgtaggcccaatatttggtatatttttgagaagctgttaatcttttagctgaataatgaagttagactgaattacgtgtctccctggactgtgacatctattttctcattacagtttatcctggtcagcagggtgtcacacctggaaacctgagtatgatagctgacatttgcttttctccctctgcgatgtcattcctcctccatccctctccttccctgtgttccgttccctctcctttcctctagacaaaacaaaatggggcactttttagggaatgctgagatcattattgtggtttttcatcattcatgccctagtcattaaacatgcaccactggaatgtaaacaatgttatctagtatgtcaattggttataatattttaaataaaaaagaaaaaagtggtatgg

SEQ ID NO: 391 - DNA, 1724 bp, Homo sapiens
gaaccctacaggctatctgagaaccaatcccctggcttgggggtgacatcagaaaactgatttgtcttctctgctggtgggggaaagcataatcctattatctggaataatatggaaagaatcatagaatcttaaccatcagggcattggccctaaactgtgatgctccattggatgataaaattggagcagagtctcggaattggagagctggtggtgaaatactggccagagatttcatcaagccatggattcttggtttggcgctatcttttaagaagagatgatgttgaacctgctccttggacctctgaaggaatagaacggtcaaggagattatgtctacgtttacagtatccagcaggttacccttcagataaagaagggaagaagcctaaaggacagtcaaagaagcagcccagtggaaccacaaaaaggccaatttcagatgatgactgtccaagtgcctccaaagtgtacaaagcatcagattcagcagaagcaattgaggcttttcaactaactcctcaacagcaacatctcatcagagaagattgtcaaaaccagaagctgtgggatgaagtgctttcacatcttgtggaaggaccaaattttctgaaaaaattggaacaatcttttatgtgcgtttgctgtcaggagctagtttaccagcctgtgacaactgagtgcttccacaatgtctgtaaagattgcctacagcgctcctttaaggcacaggttttctcctgccctgcttgccggcatgatcttggccagaattacatcatgattcccaatgagattctgcagactctacttgaccttttcttccctggctacagcaaaggacgatgatctgcctgctttcactgtgttgttcatggtggctttttggacaataaagaatctaaaatgggtggggagggtggaagaaatggtggactgtatctctcacgttctgagcagctaatcctctttcccacatagccatcatcttgtgtgtgtagtaagaggcccatttctcaactgtcttttaaatatctaaaggtagttcctgtaacaactagttttaatgagtaaaaagtcaaagcctcagctctagttgatatccaagttatgatttattttgcaactacctcaggacagaaaagatttatggggattttaaaaatcattgaataactagttaaatgaaattttagctacacactgcctcccaaatattagttgtgcctggttcttgtaatttgattttacagaaaaggaaatgacacttgagatccttggaatgaacacagcttctaaagtgtgcatatacttttttaacgtctcttcttccattacaatgtgtgttttgcaaggacaggttcattttttttagcccactttgtgaactccattgtgcttttttctggtgttttatgcaagttgactactaatgactaatgagaacaataatgaatgcattgttgctgcattagtgtaatgtggtgtggttttgcacttaaaagaggtattcatatgctctagttgtaaatgttcatgaaaatccacttctctactagtcgaactgcttttagtgtctcaccagtggttttacatctgcagagttttgagggctgtgctgacctttgagaggatttgaaattgcttcatattgtgatcctaaattttatattcactatattccctaaagtataccttaataaatattttatgatcag

SEQ ID NO: 392 - DNA, 1488 bp, Homo sapiens
tttcaaaatttttccatttttttgtgaattttattgcgataccaattatgaaataaaatcttcagttctcatctctgtatcacctcttaccattagatttaatttagtcatggatgagcctaattattgatggtaataacaatctcaactttaaacttggaagaagctacttcttcatttatggattgatttggattatctggcttttaatctatataaacaacagctctttgaacaagtcatttttattaagtaggaaactagactttcatagcttccatttagcattgttacatagaaaacaggaagacaatatcttaagagtatggaaattgaaaatcaaacctaatcttagtgcatgtaatccttttgtctgaagtgcaactcatttttcttctttcttgatattcttgattttcaaagaaatactgatttcagcatttatttttcttagagagctaggaattaataaccttcatcatattatcaaaatttttttaagtgccggacagctatactttgaaggaagcagaattgaagatgggaagttcattgggactgtgtcttggaaaagcaccaagttcgtctcagttgttcctgttttttgcaatggggagtgacgttcaacctgggacagaaatggaaatcgtagtagaagaaacaatatctgtgagagattgtttaaagttaatgctgaagaaatctggcctacaaggagatgcctggcatttacgaaaaatggattggtgctatgaagctggagagcctttatgtgaagaagatgcaacactgaaagaacttctgatatgttctggagatactttgcttttaattgaaggacaacttcctcctctgggtttcctgaaggtgcccatctggtggtaccagcttcagggtccctcaggacactgggagagtcatcaggaccagaccaactgtacttcgtcttggggcagagtttggagagccacttccagccaaggtgcttctgggaacgagcctgcgcaagtttctctcctctacttgggagacatagagatctcagaagatgccacgctggcggagctgaagtctcaggccatgaccttgcctcctttcctggagttcggtgtcccgtccccagcccacctcagagcctggacggtggagaggaagcgcccaggcaggcttttacgaactgaccggcagccactcagggaatataaactaggacggagaattgagatctgcttagagccccttcagaaaggcgaaaacttgggcccccaggacgtgctgctgaggacacaggtgcgcatccctggtgagaggacctacgcccctgccctggacctggtgtggaacgcggcccagggtgggactgccggctccctgaggcagagagttgccgatttctattgtcttcccgtggagaagattgaaattgccaaatactttcccgaaaagttcgagtggcttccgatatctagctggaaccaacaaataacc

SEQ ID NO: 393 - DNA, 900 bp, Homo sapiens
gtttttccatggaatggggttaatgagtaggtagaaaaggaaaaggaacaatcagctgcttatatggtcactggttgtcagctcctactgattgcctgtaattagtcaggctgaacaattagagttgaatgctgaaattaggaaccacaggtggtaatcctgagtagatgtaactcttcagcgtcatctcctgccctgagctccaggccatctctctaaccaccaaagaactcttagtacctacgggaaggaaaagctgtgtgcgacacagaggaaactccattatttgaacacatttctttggctcttgacaaatacttgcttttcctctaatcttgcaagagctatggctcttctattttccaatcacacagcttggcatgtaggaaaggttgaatgatcctctaagactgtgttggtcttcgtattctgtaaaacccattttttttttgtggtcttacagatgtttagaaagtggcacaggttactgaattgtctacctgccagcattctgatatagcacaaaaagctattttcctttattttttgtattattttttatttttctggcattgagctctagggtggatgagggtttatggtcctctgatcataagctccattctaaaaactggtcactgttagctgaaattgctttggttccccaaatgccttggaactctagacgcacccgcagggcctgaggtaggcttcatagagttctaggacttccgtgtgcgttgccaccagatcctgcccagcaatggcctttcccttctaaggtcattagattcagccaaaagcgacctcttctctagtccggtgttacgaacagaagttctgagttgtgctacaaaagtagttccatctttttggtgtaattttcatgtttttaatttg

SEQ ID NO: 394 - DNA, 1646 bp, Homo sapiens
gaaaagcctgcatgtgttctttattggtatcatttaaaatatactttttttttttttttggtaaaggtaggcgtattttaagatattttcttaacttgagcagtagccaacaggaaggataccagtgtctctctctcttagcgacacactccttggtcttgcttaccaactggaggacactaggtagaataaccgagtatgacaattcttaattgtttacattttataacttcctgtccttcaaaagagtttgaaatgtcattttgggaaaagagagccagtcaagctagtaggctgattgtgaagaaaatctaataccttatctttatctcaaacctctgtacaactttattttcattgatgggatactttaacaaaaatgaaattttttttgggttttaaatatgagtgattatgacctctcttggggatcaagcctcaaaagtcagaaacccagagacaaaaccgtcattgatttttaagaagaaacacactaggtcaaaagaagatgtcctggaaaaacgaagactccttaaaaaccatgcatttggagaaaggaattgtttccctgaaaaacatgattaaaaactaaaactgggatgttcctgtgtgtacacagtgccaaatggttttccctttttatgttgtgttttagaaacagcacgaaagttttttccattttaaagtgagaaaacattatatttagacttccataattccaaaatcagaagctatttttaaaattagcattttcttgcatcaccaaatggtattcaattgtttgaagctcaaaatttttaccattccataaatgtttgtgaatttttagacagtgccaatttaaaagtagagatagccaatctgaatacggtgaaattatggggatctctggtgattgggatgaaaactctggccttaaaaggtccacttttagtatataattgcctaattagcaatcatttttattttttgctcactccctggtctgaatctatctgtctattcagatattttttggtaggtttggaaaatggagaagtgagcctaattggtgcctaattgtctggtgtatcattcactttattcagtttgttctatcaatatgatttacccctcaaggttaacctagcaggtgctcagttattatctctcaaggtcacagtactagaaatacttggcttgcatctttcagatgccaattcatgttatcaagcctcaaattatagttggtcacaggattctaaagtctttatttgacttctcctttttgaactggctcaaatggaaaagtgtagttgcttttaaatgttaaaaataagtttaaactttatatttcccattggtttcccctattttgtcctttctttgtgtgcttgaaatattttatttttcagtttgtcctcatagggaatcaagtattttagctaggtgatgtcttgcaagtacgttccactttgttacaatctactatctgtatatactatttgtatcttaattcttttatgagatgttctgtaacatttttctcactttgacaaatgtttttagactgtacagtcaagatctggcgcttgggggtaagtggaatgatttgctaatattgagaatctgttgtatcaaacataataaactttttttgagatgtg

SEQ ID NO: 395 - DNA, 2187 bp, Homo sapiens
agcgtccttacaactttgaaatgtgcaataaagaatacctgtgttttagctaatgtagcatatgtaattgcaaaatgatttagaatgtcatgaaaaatatgaacatttcctgtggaaatgctttaagaacatgtatttccattatcctatttttagtgtacaccagctgaatacggagcaatggtgtttataagcgtttttttaaactatctggtcacaaagactgttacgctaaaaatgtttactaaaagatcactaaactatctcccctcttgctgaagttctttgtagtaatagctcataaaaatttgtttattaatatttcccaagtgtctgttgactcattggactgttatgaggcttgtgccatttggggaacatgtaaactcaggctcccagaactgaagatggtggctggtggcacacttccggctgctcctccgtcacctgtgaactctacaagtgacgtctttttatttcaaagaagtttatttcccacttgtatagcattcacatgctttctttacgatcctcattgtctatttgagaatggttttctgagagtgagtttacattagtagcaagagttgtttgacctgatgttccattgtttttaccattcctgtagaaaaagggtgcacaacagaaaaatgaaaatgatgtgtcatggccgtaaaagtatagaaatctttaaaaattttaaaatgtacagtcccttatctatctttcccattccttgccactgatttttgaggaatataataaaaagattggaagagtataatgccatgagaaagaatgatttaggactgtgagggttataacatgccctaggtcagcaaccaagggttgaaatcagttctgttttagggggaaatggggggggcgacagatattattccaaaattaatattaattaatatttaaacgttggtgtttttatttaaaaatcagtaactaaccatctggaattgcaccatacttaaagtcttatccattactacactgtctttaaaacaatgtttctttaaatactctacaacgtttctaagaacgaacttcagacattttaattacagtaataatagcactccttttaaggagtttcagatccacactaaaactaaaatcataaaaggctgatacttttgtttgctgctaggctatattcttccattctttgaagtcctatgatgtaatatttttgaaacctagtgtatgtcttgtcactgttgtgatatttaatcgattaagaataccttgtaaaaaggagcaaaagcttcaatgtgaaacaattttctctctttatactaaacaactgaagatagatagtttagaaagataaggacctttgaaagaagacaactctgtcaaagttcataaggaatataaaaattcttcaggaaaagagaattcaatctatatgtcctcccgtttaatatcaagaatagaagaaattaagaggaaaactccacagaagagcataggccacttttagccatgttaaaataagattaagtcacaaataccacttttgaatttacctgtcaatatctctttaggacacaaaacaatgctgaagttaatataatttctaattttaaatgtcatttaagtgtagattatgccatctaggaaggtaagtaggaaaggtaaattaaatctatttttaaaattcaaaatattagagtatttttcccctctaaagccttttttggtgattattctgtatctgacataattgagaaactggtaagctgtaaagattccagtgtagcttctctgagaagttgtgagccagtccataactgcttcctcacatccatctgattgcaccatttctgcagcaaaccccaaagcagggtgccaatatgcagatggcatagggagtatcatccctcagccaaatcacttttccatctctaaagtttcatctattttggaagtcatctccaactaattgtgtctggatttagttgctaaaattgtcttatttatgaagcagcaatattcagcctgaaagcatttctgccatagttgttgtagttatatcgccaatggctgatttttttcattggaaagtaaatttaagtaattcgtgggatgtggtatattctgtgtcaacttcaagataatcactcattttctcgttatattcaggtctgaattaaagttaagttaatcccc

SEQ ID NO: 396 - DNA, 1503 bp, Homo sapiens
ctagagaataaattattaattgtgttagcataatatattaaatttgctcatttgtgcattgctcatttcagtttgtacatgagaaggaaattatggcagaagatgatcaggtgtttcttatgaagctacaggtatgaaattatatcagaagcagacttagtatggttaatgggtaaactgttcttgtgtgtattttctttaaaaatacaccagtatatgctatgaatgtctaaactaggattctttttttttttttttcagtcccttttagcaaagcaaccaccaactgcagctggaaggcctgtggatgcctcaccaagagtcccaggaggctccccacgaacaccaaatagatctgtatcatctaatgttgccagcgtgtcacccattcctgctgggtcaaaaaaaattgatccaaacatgaaagctggagctacaagtgaaggcgttctggcaaatttcttcaacagtttgttgagtaaaaagactggctctccaggaggccctggtgtgagtggtggtagccctgcaggtggggctggaggtggaagcagtggtttaccaccatccaccaaaaagtcaggccagaagcctgtcttagatgttcatgcagaactagacagaattacacgaaaaccagttacagtttctcccacaacacctacatctcctacggaaggagaagcttcttgaagataccaaataaagccatttattctgttttctgggataatgtaaacatgcctctgccctttccttcaaaagtggaattagaaagctggagtgctcttcagatggactaaatttatgtcgtgtgtgtgtgtgtgtgtgtgtgtgttacccattttttagaaggagccgtacagaagaaaaattattctacattatgtaggattgctgtttgcattgccattttgcataagaaagtaatttttgattttgaaaatctcaaaacttttagatctgaaatacagccatgtgatcgatcatattctaaaggctatttaaaacatgtaaaaggatttggggaacggcagaaaacatgcagtttgggcatttgactgacttggaagtctaagcttattttagttataactattaaaatcatttttaaaaatttgttagttttgctgacagagaaaaatcgtcagttgtcggtttttgcaccccacaataaatgtacccccacacccggagtctgctaagaaaactatcagatagcgtttgatacactagtcattgtctcaatcactgatcctgtaagttgtcatcaaaatatgatttagaaatattggccaaggtgttgctttaactgaggagaaaagaaagcacactgcctaaatgtgtaaaagaaaaatgcagaggttattaaaatgtaaagaagtaacaatctttggatttgtctatacatatatatatatatatatgctttgccttaatatacccccttttttgtttgtgactttcaactgtaatcagttaataaagtatttattctctgcg

SEQ ID NO: 397 - DNA, 1678 bp, Homo sapiens
agaacctttcacatggcacagaagaacccaggttgcgcttcatacctgcatattccagccttagcctgccatttctctccttggcactttgtgctccagcaacactggtctcagttggtcatcctcaaacttgggttccatatccagcctcaggacctctgttcctgttactatggttccttgcatgtcgcctgctcttactaaagagctcgtgtgttttccagcacacttcggtttatctcttgatgatgatgctagtctctccctccgcaagggcggaaaaggctgcctgttggtttgtacacgtgtttcctaacgtgtagctgcagtcagtatttggctaagctgttcccaggggctcaacagatgctttcggatgagccttaactgacccaatcctttgtgatgcgggagaagaattgctaggcctcgctcacctggcaaaaacaagggaaaaaggccgcggttgcagcgcgattccagggatgtggcctggttacctgccttctctgatacgtcaagaaaccttcaacaatggcttgcagctgtaccctgttggctgcacccaggacgcccttttcactgctaagcagtcctacctgaggcccaggggctgccagattgacccataaataatctccggcgcctcagatccagaagctgctgagcctgatcttagtgccttctcctttctctgtgtggccccccagcccctttccccactgccttgtgtccaaggccctttccttcatgtatccatggaggagagacaaaaatacacatcaataaaataagatagggaatccataaatagacattcagaagtatggccaacggatttatcttaaaaccaatggaggaagaagagtttcaataaatgttgtggacttccatttgtcaaagaccaaaacaaaggaaccccaaccttacatgtaatacaaacttaactcaaaatggatcatatatctaaatgtaaaatggaaagctataaaactgaaaacagactatctttacaacctaggcgtaggtatagtttttagacattacaccaaaagcacatgccgtaaaagaaaaaatagataaattggtggatttcattaaaattaaaaaactttttctctctgaaaaatcctgttaagctgggcgctgtggttcatgcctgtaatcccagcactttgggaggctgagttgggaagaaattaatagcttgaggccaggagttcaagatcatcctgggcagcaaagtcatacactcttgagggaagagagagaccttctcatattgttttatattgttttatactcagtacctgttttaagaaaaaaacaaggaagtgaaatcaaagacaggcagcccggcaccaggcctgaaaccagccctgggcctgcctggcctaaacctagtagttaaaaatcaacttacgacttagaacctgatgttatccgtagattccaagcattgtataaaaaaattgtgaaactccctgttgtgttctgtaccagtgcatgaaacccctgtcacatatcccctagattgctcaatcaatcacgaccctttcatgtgaaatctttagtgttgtgagcccttaaaagggacagaaattgtgcacttgaggagctcagattttaaggctgtagcttgccgatgctcccagctgaataaagcccttccttcttc

SEQ ID NO: 398 - DNA, 2574 bp, Homo sapiens
ggcatgaggtagagctggcattgtaaaagtaaaggaggtgcatgatgaacttgaagatttgccttccccacctccccctctttcccctcctcctactaccagccccccataaacagacagaagacaaaggagttcaatgtgaggaagaggaagaagagaagaaagacagtggtgttgcttcaacagaagatagttcctcatcacatataactgcagcagccattgctgccaagattccagactccatcatttctcgtggtgttcaggtgctcccacgagacacagcctccctcagcactactccttcagaatcgcctcgtgctcaggctacatctcgcctctctacagcttcctgcccaacaccaaaagtccagtccaggtgcagcagcaaggagaacattctcagagccagtcacagtgctgtcgatatcaccaaggtggctagaagacatcgcatgtctccttttcctctgacatctatggacaaagcctttatcacagtcctggagatgactccggtgcttgggacagaaatcatcaattaccgagatggaatggggcgagtccttgctcaagatgtatatgcaaaagacaatttaccccccttcccagcatcagtaaaagatggctatgctgtccgagctgctgatggcccaggagatcgtttcatcattggggaatcccaagctggtgaacagccaactcagacagtaatgccaggacaagtcatgcgggttacaacaggtgctccaataccctgcggtgctgatgcagtagtacaagtggaagataccgaacttatcagggaatcagatgatggcactgaagaacttgaagtgcgaattctggtgcaagctcggccaggccaagatatcagacccatcggccatgacattaaaagaggggaatgtgttttggccaaaggaacccacatgggcccctcagagattggtcttctggcaactgtaggtgtcacagaggttgaagttaataagtttccagtggttgcagtcatgtcaacagggaatgagctgctaaatcctgaagatgacctcttaccagggaagattcgagacagcaatcgttcaactcttctagcaacaattcaggaacatggttaccccacgatcaacttgggtattgtaggagacaacccagatgacttactcaatgccttgaatgaaggtatcagtcgtgctgatgtcatcatcacatcagggggtgtatccatgggggaaaaggactatctcaagcaggtgctggacattgatcttcatgctcagatccattttggcagggtttttatgaaaccaggcttgccaacaacatttgcaactttggatattgatggtgtaagaaaaataatctttgcactacctgggaatcctgtatcggctgtggtcacctgcaatctctttgttgtgcctgcactgaggaaaatgcagggcatcttggatcctcggccaaccatcatcaaagcaaggttatcatgtgatgtaaaacttgatcctcgtccagaataccatcggtgtatactaacttggcatcaccaagaaccactaccttgggcacagagtacaggtaatcaaatgagcagccgtctgatgagcatgcgcagtgccaatggattgttgatgctacctccaaagacagaacagtacgtggagctccacaaaggcgaggtggtggatgtcatggtcattggacggctatgatggtcaccagcaggagaaagctttgatgcatgtccacatatcattgactgtatcctgtaatatgcaacggcacagctagttttcccgatttggataaaagttgatctgtatagtcaacatcttgaactatatttcaaatgaatttaaatatcttttaaagaaaaaaacacctaaaaataaatcttaacagaaaattctgttctgattatatcaaggcaaatttttcctttcttgcaaattgctttgtgtgttcaatgctaggtctgatagcgatagcttttagtagacagcggtaggtgcctgcagaacttgtgtttttctcatctttaaaatacaactacttatgctcttaaatcaaggctgtctgcttatttatactagcgtaggcaacacttggatttcccttcttagtatgcttcataactgctttacagagagcttttgcttgttctttctcatgtatctcgtgtttatgtgcacagtgccaaaagaagactgactgggtggagctctgccttgcctcaagaaccatcccctgcagagcatccagggaggtttctcgccccaatacctcacggcacagtactcttgggcagtaactggacaccttttatttgaagaaacaaactgaagaaaaaatgcttccttaagtgctgacagcctttttaaccaatacatttaaaattgtacagaacaaaaaaataaaatcaaagactgatcttgtacagatattagtgttaccagcattcatgtggaaatcaagagcaaagacaaaataatgttaaacaattctgtaccataacattttctgtaatgatactgaaacttaatgaataaaaaaattccttgatcattattt

SEQ ID NO: 399 - DNA, 3748 bp, Homo sapiens
agttccagctattcttcagatgctctggattttgagacggagcacaaattggaccctgtatttgattctccacggatgtcccgccgtagtttgcgcctggccacgacagcatgcaccctgggggatggtgaggctgtgggtgccgacagcggcaccagcagcgctgtctccctgaagaaccgagcggccagaacaacaaaacagcgcagaagcacaaacaaatcagcttttagtatcaaccacgtgtcaaggcaggtcacgtcctctggcgtcagccacggcggcactgtcagcctgcaggatgctgtgactcgacggcctcctgtattggacgagtcttggattcgtgaacagaccacagtggaccacttctggggtcttgatgatgatggtgatcttaaaggtggaaataaagctgccattcagggaaacggggatgtgggagccgccgccgccaccgcgcacaacggcttctcctgcagcaactgcagcatgctgtccgagcgcaaggacgtgctcacggcgcaccccgcggcccccgggcccgtgtcgagagtttattctagggacaggaatcaaaaatggaaggcagcctctggagtgttctggtggctggggattggatggtaccagtttgttactttgatttcttggctgaatgtgtttcttcttaccaggtgccttcgaaacatctgcaagtttttagtcttgctcatcccactcttccttttactagcaggtctctccttacggggccagggcaatttcttttcgttcttgcccgtgttgaactgggcaagcatgcatagaacacagcgggtggatgacccccaagacgtgtttaaacccacgacttctcgcctgaagcagcctctgcagggtgacagtgaggcttttccgtggcattggatgagtggcgtggagcagcaggtggcctctctgtctggacagtgccaccaccatggtgagaatctccgagagctgaccactttgctacagaagctgcaggctcgggtggaccagatggaaggcggcgctgccgggccgtcagcttcggtcagagacgctgtgggacagcccccgagggagactgactttatggcctttcaccaagaacatgaagtgcgtatgtcacacttggaagatattctgggaaaactgagagaaaaatctgaggccatccagaaggaactagaacagaccaagcaaaaaacaatcagtgcggttggtgagcagctcctgcccacggtcaagcacctccagctggagctggatcagctaaagtcagagctgtccagctggcgacacgtgaagaccggctgtgagacagtggatgccgtacaagaaagagtggacgtgcaagtcagagaaatggtgaaactcctgttttccgaagatcagcaaggcggttctctggaacagctgctgcagaggttctcatcacagtttgtgagcaaaggcgacttgcagacgatgctgcgagacctgcagctgcagatcctgcggaacgtcacccaccacgtttccgtgaccaagcagctcccaacctcagaagccgtggtgtctgctgtgagcgaggcgggggcgtctggaataacagaggcgcaagcacgtgccatcgtgaacagcgccttgaagctgtattcccaagataagaccgggatggtggactttgctctggaatctggtggtggcagcatcttgagtactcgctgttctgaaacttacgaaaccaaaacggcgctgatgagtctgtttgggatcccgctgtggtacttctcgcagtccccgcgcgtggtcatccagcctgacatttaccccggtaactgctgggcatttaaaggctcccaggggtacctggtggtgaggctctccatgatgatccacccagccgccttcactctggagcacatccctaagacgctgtcgccaacaggcaacatcagcagcgcccccaaggacttcgccgtctatggattagaaaatgagtatcaggaagaagggcagcttctgggacagttcacgtatgatcaggatggggagtcgctccagatgttccaggccctgaaaagacccgacgacacagctttccaaatagtggaacttcggattttttctaactggggccatcctgagtatacctgtctgtatcggttcagagttcatggcgaacctgtcaagtgaagacactactcattatttttgtacatttttgtatatactgggacagcgtgaaacactggaatccttcatggacgagggcatatacaatgatgggacagtgccacactccttcaataaacgtggctgctggccagaggacgtgagcgtgtgacgggcgccttggcgccacctgttgggtgctcactgcctctgcaggtgcagaggggtcagcagcaggagaagcgtgttgaacacgtggctctcagacactccttgtttttaacgggaagctctttgcatttgcatttcctcaacaaaggagcaaagcagaggaagctgagagtctggcgtgttcttgacgctttggtcttcagccttgcactggctcttctaaaggacttttggagggcagataatttcatctgttaaatccaacacacatttctttcagggaaaaacaatgtcaccaaattttcagagttctaaactcctttccttcaagccggaattttccttttttcagcaccagtaggtactaagtctccagatggggaaataactaaaatgtgtttttctgctttgttcgctcttacttctgaggaaggtttccagtcaggactcgctgtaccaatatccatggaggaatatgggagcgtttcgctctccttgtaggctgaagtcagtctgacttgaaggggcctggtttggatctaagcaaacacccagatggggttctctggtctcagcaaggcttttcctgttgggagtcacagtaaacagaaacccaaaaatctcatcttgggtgttttcagggcttgttttgagttttgctgaatagggagcgcaagacgccctgagcctccctctcactggtggtgataagaggagccgtctggtgtgtcagggtcacgaacccgttacatttcaggacgatcctttttccttcagcagcatttcttactggctgtggctggaatctgccttttatcacagctgtcaccattctcacgtgattcttgtgagactctttttggttataattactatttaatatttagactattttactgagcagactttataaatgagatatctacaaggcacttaaagtgttacagatgttttaccttaagaattatttaagttgtgttgggttaagacagttttcagtgtaccgtaaatgttgtgttttcagaaaaagacaaaacgatggtgctgactggttttctgtatattgcacaacagtcctcaaatacactgatgtatgaaactattcatacatcaagcagcatttttttcactctccttagaattggaactatgcagttaaggcagataaaatgtacagatgtttcatatattacaggttacatatataaatcaaaatttcctatataaaactgatttgggatttggggtggaaatattttgaatattaatttatttttaaagatgcaagataggactttgtgcaatgtatttttgtaaatgcttttcaaaatatctgtctttggtagtgcttctgctgctgccaccaaattgataagatgctattaagaggtttaaataaagagttttaattttt

SEQ ID NO: 400 - DNA, 1514 bp, Homo sapiens
tctaactttgaggcattcacttttgtaaaccgcgaaagtgccttacattcacctcatgagtattttaagttgatgcccagtgctgtggtatatcctgtatatatgtgttttgtggtatctatcgaaattattcttataatttagaaagttagaaaatagaaattgtaaatgaaaatgtggcgacctgactgcagaactttgagtactgaaccacatttaggtgaggcattttcatccattctctctgatttgctctctcaggattcatcttctactgtgtatgtcttctttcctcttagctctccaaagctgtatgatggatgggtgagaaggatgtgcattttggttgataggaaaaatgtttctgttttcttccttttcccctcacttcaagcattgatgattacattgattgagctacctcatccattaatttgaaaggctacacttcatcagctcatgtttaagaagtagcacatcccaggtaaacagagtaggccattattcaactcttaggatgagtatattaaaagcattcagatatcaatgacagaagaaacaagccctaatgtttctttataacagctgattcctgcaagaaatgcaaacacaggatatttttctgttccattacaagattactaagagatggaaaatattatcattctgtattttgtcagtagtacgattgcatacatactaagttgtaaacattgaattacaaaaaatgattgtcctaattgaagcagtcctcaatccatttgagtctgtacaataccctgaaaaggaaacaacaggtgctggagaggatgtggagaaataggaacacttttacactgttggtgggactgtaaactagttcaaccattgtggaagtcagtgtggcgattcctcagggatctggaactagaaataccatttgacccagccatcccattactgggtatatacccaagggactataaatcatgctgctataaagacacatgcacacgtatgtttattgtggcactattcacaatagtaaagacttggaaccaacccaaatgtccaacaacgatagactggattaagaaaatgtggcacatatacaccatggaatactatgcagccataaaaaatgatgagttcatgtcctttgtagggacatggatgaaattggaaatcatcattctcagtaaactatcgcaagaacaaaaaaccaaacaccgcatgttctcactcatagatgggaattgaacaatgagaacacatggacacaggaaggggaacatcacactctggggactgttgtggggtggggggaggggggagggatagcattaggagatatacctaatgctaaatgacgagttaatgggtgcagcacaccagcacggcacatgtatacatatgtaactaacctgcacattgtgcacatgtaccctaaaacttaaagtataataataaacaatatatatatatatatatatataaaataccctgaaaaataaaaatgaaaaatttgttgaaag

SEQ ID NO: 401 - DNA, 1355 bp, Homo sapiens
  misc_feature 1282-1285: n = a,t,g, or c
gcacacctgcctgctggcactgccagagcctggggctggcctgttctgctcagcagctggtgtcttgcagcctggcacaagtgtgggtatggcctgcaaagggcagcagggaaggcagggggctcatctgcgcccctgcgcccacagagtacctttcactgcgcgcggctggccgcaggggctggactgcagctggtggacgctgtgctcactggagctgtgcaaaatgggcttgccctggtgaggcctcccgggcaccatggccagagggcggctgccaacgggttctgtgtgttcaacaacgtggccatagcagctgcacatgccaagcagaaacacgggctacacaggatcctcgtcgtggactgggatgtgcaccatggccaggggatccagtatctctttgaggatgaccccagcgtcctttacttctcctggcaccgctatgagcatgggcgcttctggcctttcctgcgagagtcagatgcagacgcagtggggcggggacagggcctcggcttcactgtcaacctgccctggaaccaggtgcccaccctcaagccccaggtccccacccagccccctccccctgggcccctcccctcccccacagttcaccctcaagccccaggtccccacccaccccctcccccgggcccctcccctgccccacagttcaggatgtagcctgggatgtcctgccaggttgggatgggaaacgctgactacgtggctgccttcctgcacctgctgctcccactggcctttgaggtgactgcacggagggctcccccagggcagccgggtgggagggggaccttgtgcctggagtgcgccagtgaaggcaggaggagggttatgagctgtcccactcctgtgtggctggggaaggtgctcaggaggggatgggatgggcctggctcgccctcacctgggctccagcccctctctgtcgaccctccccactccggcctggcctgtagtttgaccctgagctggtgctggtctcggcaggatttgactcagccatcggggaccctgaggtgagggccttgccttgccagggagggcttctggggtcctggggcccaggtcccccatcacacatggctctggtccagaactccacaccccagctagcagggatcctggcccgggtgctgaatggagaggcacctcctagcctaggcccttcctctgtggcctccccagaggacgtccaggccctgatgtacctgagagggcagctggagcctcagtggaagatgttgcagtgccatcnnnncctggtggcttgaaatcggccaaggtgggagcatttacaccgcagaaatgacaccgcacgccagcgcccc

SEQ ID NO: 402 - DNA, 1729 bp, Homo sapiens
cattttgcattctctctccttcccaaatgacagccgaatgccttgtacatcagtaggtgctcaaaaaatgtctgtctctggttgaattgtagagacccatacaatttctagcccaaggtgctttgtggcctcaacaactcctgcccccttcctctttgagcatgctctgcatctctgtgttgccctccccgcttcctggtttgctcttgcccacttctcttttagctttatcaccagaccacagacagttcacagaaggcccactgaagggaagcctgagaaggaaaaattcaagtcatctctccaggggcctatcaccactaaccaacctgttgccgtaaagtaattgcactgtagtcttcctccttgaaagctaaactggtcatatttagtccttgccagcctaaattggatttgcacagggtgcaaattggatttccagtctagaacttacaggtttgcttggcatgagatgtgtttttagagatgtctgtgttcattttattttattttattttatttatttttttgagacggagtctcgctgtgtcacccaggctggactgcagtggtgcgatcttggctcactgcaagctccgcctcctgggttcatgccattcttctgcctcagcctcccaagtagctgggactacaggcgcctgccaccatgcccggctagttttttgtattttttagtagagatggggtttcaccgtgttagccagaatggtctcaatctcctgacctcggcctcccaaagtgctgggattacaggtgtgagccaccgcgcctggcttatttcattttttgaaacggagcccagcttatttcattttttgagacggagttcactctgtcacccaggctggagtgcagtgacatgatctcgactcaccttaacatccacctcccaggttcaagcagttctcctgtctcagcctcccaagtagctgggactacagacatgtgccaccatgtctggctaacttttatttatttttattatttttattttcatttttttgagacagattctagctctgtcacctaggctaaagtgcagtggcgtgatctcaactcactgcaaccttcacctcccatgttcaagtggttctcctgcctcagcctcctacgtagccaggactacaggtgtctgccaccacacccagctcatttttatttatttttagttttttgagacagtcttgctctgttgcccaggctggagtgcagtggcatgatctcggctcattgcagcttccacctcctgggttcaagcagttctcctgcctcaacctcctgagtagctgggattacaggcgctcgccagcaagcccgttacaggtgcccgccaccacgcctggctaagttttgtattagtagagacggagttttgctatgttggcctggctagtctcgaactcctgacctcaggtgatccacctgccttggcttcccaaagtgctaggattacaggcgtgagccaccacgcctggtctttattttattcattattatttttaaaaaatttttgtatttttagtagagacagggtttcaccacgttggccagactggtctcgaactcctgacctcaggtgatcctcccacctcagcctcccaaagtgtggagataataggcgtgaggcactgcgcctggccctgtgttcattttaaatgatagaatctatggcacttctttttaaagctgtgagatatttgagaaatgt

SEQ ID NO: 403 - DNA, 1347 bp, Homo sapiens
ccaaagacacaccaccagctcttagctgctcggcccagagacacacatctctctgtattaaaaagaaatttccaccttgagtaccccacgcttaatgctattaatctagtttggttggggcgggggcgggggggcttgggcaaggcttattattttctgctaatgaaccgaaaggcttaattttgccttattgttcagtgtggattatttaagaggttttgcgtgtatttggtgccttcgggtgtttggagtgcttctgtgcctttccctacttgacgtgttattcagggaccatcgcagcgtgcctgtggctcgtctgggttctctgtttcgtgtgtgtttaactctgtgtgggtccagtcttcagcagtgacgtaatgaaccgctcttgcagtttctcctggcggcgctggtcctgtctctcattctgccgaggagcagccagtacatcaagtggatcgtctctgcggggcttgcccaggtcagcgagttttcctttgtcctggggagccgggcgcgaagagcgggcgtcatctctcgggaggtgtacctccttatactgagtgtgaccacgctcagcctcttgctcgccccggtgctgtggagagctgcaatcacgaggtgtgtgcccagaccggagagacggtccagcctctgatggctcggagatgatggaccgtggaagggaagcgtctgtggggagtgagcgcttagatggccagcagctgctccttctgggaagctcgcaccttggcaacagaacagccctctagcagagcgtcagtgcagtcgtgttatcccggcttttacagaatattcttgtcctattttagaattttccggagtagtttatttgcagtctgttgattatgtgcagtagacccgggacactgcgttttaccgatcaccttgaatgtggtgcctggatgtgcctttttttttttccctgaaattattattaattttctattgtgagttcatcagttcatagtttttttagtaaagaagcaaaattaaaaggcttttaaaaatgtacaacttcagaattataatctgttagtcaaatatttgttattaaacatttctgtaatatgaagttgtaatcctggccgtgagcttggaagcttacttttgattcttaaagcctatgttttctaaaatgagacaaatacggatgtctatttgccttttattgtaacttttaaatgaaataatttcatgtcaatttctattagatatatcacttaaaatatttggttttaaatcacaagaatatgtattctttaataaagataatttatgatcatggtataattaattgaaatttattaaaatctgtttttattt

SEQ ID NO: 404 - DNA, 1645 bp, Homo sapiens
  misc_feature 99,103,1080,1144,1145,1147-1149,1590,1591: n = a,t,g, or c
ctcacgtaaggctttttctgaatgtaattgtgaatacaaagccttgctggtcctttttatcattacccaatggatgactgtttattagctatcagcagaattccgtaggcgaaagcaagccgtgaacgatgtacattttgctttaatagcatgttagcgaacaaacttccatggacttttgtggacaaggtgctgctttttctcatgaccctgtagaattgctatcgaccacatcttctgtagcactgacctgtgtgaactcagggaagaatttgtgcatacaaatgagtggaaacagagcaggattcatgaatatgaatgagaatgtgaatcattttggagaatgccctgggcacacgggtcaactggaaatttcatttctctaagaaagtagccctaccagcggcacggactgttcctgttcctcatacctgtggggattcctccatattggaactgtttcatgtatcttttttgcattgtaactagccaaacctgaagtcagtaaataaaatgagattagcactttttttaggtaccagttgtatcactgagtaatgcacaccaatagagcaagaaagtataaaatgtatttaagaccaactggtttgcttattatgactgactttgaaaaagcccatatcccatgatatacatgctttaaaaggtatatctatcgtaggaccaggaaccaaaatgggaattttacttctggtcctgttttgtaaatagttcctttttttgaagacaatctcatgttttataacttttgttgtgggtctgagaatcacaatggtaatatgtcttggcaaaacataacctttaaatacaaaaacaattataacttaattttccaaataaaacaagaaatacactgattaggcttctacagttctaagagacatgacactttggtaataagcgtcagtactctacttctcaagttaactggaaatattttacaagatgcagtgttttgttaacacaaagaacgcngacattttgtgagaaatgaccttggttttatacattgnggcttattttttaaaatatagtattttaccaggcaggaagtattantattataagtaattcttgctcaccaaacaaagggctatgtctcttttaagcaaatgttttgatnnannnctttttaattaaccctctgcagcaagggtagaaatacagatcagatggaatgggtattataggagaatcaagatagcaacagctactccttttaccattactagtgtgttttcaaagtatggaaaaagatgcctgaagagtcattttatatattttaaatctaaaaagtgttaacaggtatgcttataggccatgggagaaatattcttataaattttttagtgtaaaatgataaattctgtgtcacaaagacaagtttaccacttgacctaccagaatcacagatacttgcatttaactagcaagtatcatttggtggaaatttctaaaatcatagtagacaggcccaaagatagaattcttaggtgatcagtagtgtttaaaataattttgtcctcagcactaactatataactgtaatttctacataagaacaagtgnntccaaaatatagtggagggaaaaaataaaaaaggaaaaaaaaaaaaaaaaaaac

SEQ ID NO: 405 - DNA, 2001 bp, Homo sapiens
catgaaaacactgattgactttgtgaagatgatggtgaaatatggaacaatatctccagaagaaggtgtttcctaccttgaaaacttggatgaaatgattgctcttcagaccaaaaacaagctagaaaaaaatgctactgacaatataagcaagcttttcccagcaccatcagagaagagtcatgaagaaacagacagtaccaagggaagaagcagctaagatggaaaaggaatatggaagcttgaaggattccacaaaagatgataactccaacccaggaggaaagacagatgaaccccaaggaaaaacagaagcctatttggaagccatcagaaaaaatattgaatggttgaagaaacatgacaaaaagggaaataaagaagattatgacctttcaaagatgagagacttcatccataaacaagctgatgcttatgtggagaaaggcatccttgacaaggaagaagccgaggccatcaagcgcatttatagcagcctgtaaaaatggcaaaagatccaggagtctttcaactgtttcagaaaacataatatagcttaaaacacttctaattctgtgattaaaattttttgacccaagggttattagaaagtgctgaatttacagtagttaaccttttacaagtggttaaaacatacctttcttcccgtaaaaactatctgaaagtaaagttgtatgtaagctgagattttgtatacagaatccttatttcctcatagacttatattttataaacagaatatgttgctttgaaaaagcctctaatggactgaccttaaaactcatccttcttccactgtctcatccacataagcactccccgaagaattaagggggttctgttttcaaggcatgccaagtactaaagcaccttgcagagcgtgtctattacaagatgtcatttccaccagcagttcccttaggggagctgaaataaattcacattttctcaaagtctcatagctttggaggagccatctgcttttttggctgctctttttagctggctttttattaggctcagtgacataaaaaggatccaggtaaatgggtataggatttgctggatttactaacaatttccccctgttcttaacacttcctattagtgacttttcagacattgagtttacttataaagagagacatttatgtactctctaagaagacaaatgaggtcataaacactgcataaagcaaggcaaaaatgtatgccacatctcagttatctaaactagattagatccaagccaagttttctcaacagagagcaaagggccaggcagtaaggtagaaatagagataaaaatcattccttccttgtgatccaaagctggtcgagcagctttcctggaggaaaaggttcatgaacttcaggtccgtgcaactcagcccccaccacaaacacagccctggaaacatacagtggcgcaaggtcctcttgaaatgttaatggttaatgttcccaaaccagagaatgctttgaaaatgtatcattcagtgtaaattaattacatacatatttttctatatatttgtttcaaactgtaaaaataacataatatgtaatttgtgtattagtgagaggtgaagccagctggacttcctgggtcgagtggggccttggagaacttttctgtcttacaagaggattgtaaaatgcacccatcagtgctctgtaaaacacaccaatcagcgctctgtagctagcaataggtttgtaaaatgcacccatcagcactctgtaaaacgcaccaatcagcactctgtaaaatgcaccaatcagcaggattctaaaagtagacaatcacagggaggattgaaaaaaagggcattctgatagggcaaaaacggaacatgagaggggacaaataagggaataaaatctggccaccccagccagcagcagcaacctgttcaggtcgcctgccgctgtggaagctttgtccttttgctcttcataataaaccttgctagtgct

SEQ ID NO: 406 - DNA, 3078 bp, Homo sapiens
ggggctttaggaattacaaacagtattaactcttctctggggaaggaaacaattactgagagaaacagggaagtggtgtaagtagaaatctgctatgatatctctagctggggcaaagaacttctaacctctcactcctaaggagtaaatatggtaagaaaaggggaggagcttaaaaagtaagtaatacattaccagggaacgaaacatccttatggtttgcaatttgccttttgatggtccaccatttacttcgtagccattgtggtgaacggacactactccatccctcagctaacagatcccagttaatgtcattttcatcagctacatcaagttctgctatcctgaggatgagattgatttcatcttccttggtccattcagtacccccactctgtttccaattcaggtagttgagccatttagaacgacattgcttttctgagcgggtaccgactcgttcagccacagctgcccaagacacaccctgtgtgactatgtcacctggctcagtgcttgtcaactcatgaaccacttctgcaagtctcttttcttcttcttctgtccacttccctgtgttgcaagtatccttcatcagtcggcaccgatctttgacagaagatgcacttcttcctagcgccgcccctattgttgcccagtcattgccatgctttatccggagcctaaaacaagagtctgccaatcagcatttggttcaattgttttctcccttttaatttcatcatttattcttcattcttcttcttcccatttgactggtttggaagttgtgggcagcaatactttgagagccaaagtttgaaagtgtggcctttttttggggtccacagttgttccttgagcttctcaatttcttcaggtgtatattttcccacatggtttctgtcatcatacatgcgaagcactcttctataaactgcaaacaaaggccggttcagaccccatgctatagtcctgtagaaatcttttctttcgtcttttgacatctcaaagatgatttctgtagcatcttttattccgcgtgccttaagatagcgttcaatattgttcatcaaaatatcaatttcttccttggaccacatcccctgcttccatttatgtcctttattagtcagagaatccttatcttctttagttgtaaaccatgcttggctaactgctgaaacttcctcgttacccaagggagatatttcatctagttgctcattctgcaaaatctgtatctgtgtcacagtcccctcagtaacctcatcatctgctacttctgtggtcgcagtcatggtcacttcaaagctctgatcattttctgaaagtggaagtgcaacaactgatatgcaaggagtagaatcaatactctgatcatcctcagaggacaaacaaagccttttatgtggaggttcaatactatcttctgagtctatttcatccgcttcattctgagggcagtgaagaatgagattcccttctgtgtcctgagtcaaagtcacagagttcacagtttctactgttactgtgtcagaatcctcttccactgtgctcatactcaaatctagacaacggatggatcagctacagcccttcccacagaatcaagttgccttcccttagcaaccagcatcactttcatgttacccagattggttctctcccatgttcctatctccgcaacactctgaaaaaagtaacagcattacacacaataaggcttaataagaacaaacgaatagtatagcagtatgctgatgacaatctaggcccaagcctctgtgatatctcatctggagagtaagacaaaaccagaattcttttttaagcagaatttttggaactggcctctaaaagtattccccaatgaaggacagaaatgatgactattcacaggagtttcttaacccaagtggctctcatcaggcagacaaacgttctctgaaaaaaaaaaaaaaaacaggctcagctatgctagtgattctatgaactgtagactgtggtaccattatgtaacatgatgtgtatatcaatcaatacagcaccataaatattattagtaactatagttttcctttataattattaacacctctttatgttttatcttaaagcattaaaaattatatagtaccctattcatccagaaaacccttttaagatgacagatgaacaaccctatctaggaatctgtggaaaaaacaaaaacaaaaccttaaacaattaggccagaaaagacaaattacaagctcttgaaagcaatgtgaaactttatgaaatatgaaatggtttttaaaggtttctttcaataagcttctcatctttatcctcaaaagccaaagaccttaaaaaaaaaaaaaaagcacatgatttgaggttcaaggggacgtttcagcaaaaattagggattaaaattctaatttttgcggcattctaattagatcctctttgcattttcagtgaaaaaggtacagatcctgctggagaaccattaagctattagatttcatgttgttatcattctgaatccattaattttttaaaggctggcttttttgtaatacctactacaaaagatgggagaaagaaatgtaaaaaagtaaaaaaaagaaggttaaaatcatccataaacttcccaacgatttttcatactctttgtagttccttctaatctcatctcccggtgtatgtgtgtctgtgattatagtgtattgtgcaattttatatcctgctttttagaatctgctcagattgaaaagtgtgaaggaaaccaaggtaggcatctaacaaaagttattacttaaaacttaacactgcaccaggcgtggtggctcacccttataatcccagcactttgggaggaggatcacctaacctcaggagttcgagaccagcctgagatagtgagatccagtctccagaaaaaaaacaaaaaactagccaggcgtggtggtgtatgcctataatctcagctactctggaggctgaggcgggaggatggctgcagcccaggagatcaaggccgcagtctgggtgagagcgagaacctgtctcaaaaaatagaaaagc

SEQ ID NO: 407 - DNA, 1553 bp, Homo sapiens
  misc_feature 1344,1517: n = a,t,g, or c
gtttccaattcctctgaggtgtcattgcttgaatgtcacagaaataatgcacattccataatctcaaacataacccatgatttccatactctcctccttttgtatttctctctccgtgaatagaaccaccatccacccaggcctctatgacagaaccttgggtgtcactgaagacactttttcctctctgttacttctcatatcaaattggttaccaagtcctgggaattacacaggatctcatctttttccttttcttcatacccactgccatagccttggttcaagtcctcatcatctcttacatggcccatggtagcagtcagctagcaggaccccctgcttctagatgtacctcttttaatccattctccaaacattcaccaagtgatctttttaaaacacgaagcagataaagttacccatacctacctgtttaatacctttcaaaggttaccaatattcttgcaggataaattacaaatccttaacattattccctggctcttgtctacatctctatatttttttattaagttcaggttctttcctcatctgctacctatccatgccagacaactaagactcagactcagtctcactaatttgtagctttgcttacactgctccttctgcttaaaagatcttcaaatcttctcccctacttgcctttaacctgatgaatttctactcattcttaaggtctaatacaagcattactgcctctacaaaccttcctgaaatccacagaggaaattatacacttccatctttgtttcataaatctaataagaactaatatttatggagtactgatattgcattagacattgtattcagtggtttattacattattgtatcctataaacataaattattttcacattaccttactattatatcctacacaatcacttgtaaattattttagtacgctttattttacctacttatttacatattttgtaatattatcctactaaactgaaaactacttaggactgaactgtggttcatcttactctctattgcctaagctacttcattgcacaagtaggtctcaaagctctgttgataaatgaagtttaatggtttcaaggagactgatattatataattagagatgttaacaaatgcattaaaaattttaacgcatcttgaatcaaagcaattatctatctaacttagtagctgtgcaacaaagtaaaaagagcaagagtgccattaatatatctcaaagataagcttgtttaataatgcatgtttgggctgggtgcaatgctcacgcctgtaatcctagcactttgggaggccgagacgggcagattgcctgggctcaggantttgagaccaggctgggcaatatggtgaaaccctgtttctactaaaatacacaagaaactagccgggcgtggtggcgcgtgcctgtagtcccagctactcaggaggctgaagcaggagaattgcttgaacccagcaggtagaggttgcagtgggtcaagatcgcaccactgcnttcagcctgggtgagagagtgagactccgtctctac

SEQ ID NO: 408 - DNA, 1396 bp, Homo sapiens
  misc_feature 1356,1360: n = a,t,g, or c
cacagctgctgggcatgaaaaatggtgtagctcctatggaaaacagtttgtcagttgcttccagtttcaccacatcctcaccaatacttgttatttttgcttttttaaaaataactattttagtgggtatgaagtgatatctcatcatggtataattttgatttacatttccctaatgactaatgatatggagtaccttttcatacgcttgttgactatttgcatatcttttctggagaaatgtctgtttaagtctttgcccattttaaagtgatttgtctttttgttgttgagttgtaggagtgctttatatattctggatactagacccttatcagatacatgatttgcaagtgtcttctccctttttgtgggttttctctttattttcttgatggtgtcttttgatgcacaggttgtaaattttgatgaactctatcatttgttttctcttttttccttttgtttatggtgtcatactttagaaaccattgccaaatccaaggtcattaaaatttacccctttccagaacctaaggttttggttttcttcctcttttttattgtggtaaaatactcatagcataaaatttaccattttaacaattttaagtgtatagttatgtggcattaaatacatttgtattgtgtgtgcccatcaccaccacccatctccagaactttttcatctcccccaactgaaactctaaccattaaacactaatttcccattcctccattccctcagcccctggcaactaccattctactttctatttctgtgaatttgactactctaggtacctcatataagtggaatcatacaatatttgtccctttttgactggcttatttcactcagcataacatcatcaaggttcatccatgtggtgcatgtgtcaaaatttccttcccttttaaagccgaatattatttgtatgtatttaccatactttgtttattccaatatctgtggcacttggtttgcttttaccttttggcgattatgaataaggatgctgtgaacatgggtgtacaaatgtctgttcaagtccctgctttcacttcttttgagtatataccctagaaatagaatagcttgatcatatgataattctacgtttaattttttgaggaattgccatattgtttcccacagtagctgcaccattttacattcccaccagtaatacacagatattcaaatttctccgcatccttgtccacacttgttgttttctgtgcttttgacaatagacatcttaatgactgatttgggtaccttttatttcattttcttgcctaattgctccggctgggcctttcagtactaggttgaatagaagtggtaacatnggcntctttgtctttttacacttaggttctggaaaaagct

SEQ ID NO: 409 - DNA, 3907 bp, Homo sapiens
  misc_feature 3870: n = a,t,g, or c
ctgtctctgggaatggcgtaagtcaaggcaaccttggtcatcaagcacaagcttcatttgcttttgaactcctatgggggagaaatactacaaaacacaaactttaaaagtgattcattgtgatcttatctgagatttttcatttcattaggagataaagaggagagaataacttcctcttccaatagttttttttttctgatatattctcatttctcattttttctctgctccctaatgcttatttttctttctcctctggcccttttccttctgattgtttttccttcctttccttctctccatgacttcattcttattttgctccatctcttcctcactaccatctcctttattgagttattagccatctttttaaaaacttcctagtcttacaacaaaaaatgataaaggggatatcaccaccgatcccacagaaatacaaactaccatcagagaatactacaaacacctctatgcaaataaagtagaaaatctagaagaaatggataaattcctcgacacatacactctcccaagactaaaccaggaagaagttgaatctcttaatagaccaataacaggagctgaaattgtggcaataatcaatagcttaccaaccaaaaagagtccaggaccagatggcttcacagctgaattctaccagaggtacaaggaggaactggtaccattccttctgaaactattccaatcaatagaaaaagagggaatcctccataactcatttatgaggccagcatcattctgataccaaagccgggcagagacacaaccaaaaaagagaattttagaccaatatccttgatgaacattgatgcaaaaatcctcaataaaatactggcaaaccgaatccagcagcacatcaaaaagcttatccaccatgatcaagtgggcttcatccctgggatgcaaggctggttcaatatatgcaaatcaataaacataatccagcatataaacagagccaaagacaaaaaccacatgattatctcaatagatgcagaaaaagcctttgacaaaattcaacaacacttcatgctaaaaactctcaataaattaggtattgatgggacgtatttcaaaatactaagagctatctatgacaaacccacagccaatatcatactgaatgggcaaaaactggaagcattccctttgaaaactggcacaagacagggatgccctctctcaccactcctattcaacatagtgttggaagttctggccagggcaattaggcaggagaaggaaataaagggtattcaattaggaaaagaggaagtcaaattgtccctgtttgcagatgacatgattgtatatctagaaaaccccattgtctcagcccaaaatctccttaagctgataagcaacttcagcaaagtctcaggatacaaaatcaatgtacaaaaatcacaagcattcttatacaccaacaacagacaaacagagagccaaatcatgagtgaactcccattcacaattgcttcaaagagaataaaatacctaggaatccaacttacaagggatgtgaaggacctcttcaaggagaactacaaaccactgctcaaggaaataaaagaggatacaaacaaatggaagaacattccatgctcatgggtaggaagaatcaatattgtgaaaatggccatactgcccaaggtaatttacagattcaatgccatccccatcaagctaccaatgactttcttcacagaattggaaaaaactactttaaagttcatatggaaccaaaaaagaggccgcatcaccaagtcaatcctaagccaaaaaaaaaaaaaaaaaaaaaaaaaaaagctctaagcgtacctgcgtgaggaggacctggacgacagccccaagggagggctggacattctcaagtccctggagaataccgtctccacggccattagcaaagctcagaatggtgcgccctcatggggtggctaccccagcatccatgcagcctaccagctcccgggcaccgtgaagccactgccggcggccgtgcagagcgtgcaggtgcagccgtcctatgctggcggcgtgaagtcgctgtcttccgccgagcacaacgccctcctgcactccccagggagcctcacgcccccaccgcacaagagcaacgtgtctgccatggaggagctggtggagaaggtcacgggcaaggtcaacatcaagaaggaggagagaccccctgagaaggagaagagctccccggccaaggctgcgtcccccatagcaaaagagaataaagatttcccgaaaacggaggaagtcagcggcaaaccacagaagaagggccctgaggccgagactgggaaggccaaaaaggagggaccgctggacgttcacaccccaaatggcacagagcctctcaaagcaaaggtcaccaacggctgtaacaacctggggatcatcatggaccactcaccggagccttccttcatcaacccgctgagcgctttgcagtccatcatgaacacccacctgggcaaggtgtccaagcccgtgagtccctcgctggacccgctggcgatgctgtacaagatcagcaacagcatgctggacaagccggtgtaccccgccacccctgtgaagcaggccgatgccatcgaccgctactattatgaaaacagcgaccagcccattgacttaaccaagtccaagaacaagccgctggtgtccagcgtggctgattcggtggcatcacctctgcgggagagcgcactcatggacatctccgacatggtgaaaaacctcacaggccgcctgacgcccaagtcctccacgccctccacagtttcagagaagtccgatgctgatggcagcagctttgaggaggcgttggacgagctgtcaccggtccacaagaggaagggccggcagtccaactggaacccgcagcaccttctcatcctgcaggcccagttcgcctcgagcttgcgggagaccacagagggcaagtacatcatgtcggacttgggcccgcaggagagggtgcacatctcgaagtttactgggctctccatgaccaccatcagccactggctggccaatgtgaagtaccagttgaggaggacagggggaacgaaattcctaaagaacctggacacagggcatcctgttttcttttgcaacgattgtgcctctcagttcagaactgcttctacatacataagtcatttggagacacacttgggcttcagcctgaaggatctctccaagctgccactcaatcagattcaagaacagcagaatgtttcgaaagtcctcaccaacaaaactctgggcccactgggggccaccgaggaagacttgggctccacattccaatgtaagctctgcaaccggacttttgcgagcaagcacgcagtcaaactgcaccttagtaagacccacggcaagtctcccgaggaccacctgatctatgtgactgagttggagaaacagtagcgtccaggtatgcaagagaccgcggaacattgcactaaacgtcgtcgagctgcactaggcctggcctgagcctctgaaatcagtctttcctttgttgctggcccgcctctctggaccttggttttcttacacatattttgtatatttatatgctctctgtccgatctgtgcatgttatttttctttttccgtgagtcaaagtctgacctttattttcaacatctgttcttggtgttaagctatcttttgtaggaaatagtggggcacactactcagagacattatttagcagtaaagaaagacacaaataacaatgataaaaagacatcctaaaatggtgaagttgccatgacaataaaggtcatagaacctggtagtgtcaaatttaacccnttgaggactgtaattgcatttctgtgcctttcacttg

SEQ ID NO: 410 - DNA, 1626 bp, Homo sapiens
  misc_feature 861,1590,1592: n = a,t,g, or c
tacaagtccagaaggctcaaaatctatagtggaaggaatcatagaggaagaagaagaagatgaggaaggaagtgagtctataagcaagaggaaaaaggaagatgacatggagaccaagaaagaccatccatacacctggagaattgaactggcaaaaacagaaaaatactgggacggctggttccgaggcttatccaatctctttcttagttgtcccattcctaaattgctgctcttggctggtgttgatagattggataaagatctgaccattggccagatgcaagggaagttccagatgcaggtcctaccccagtgtggccatgcagtccatgaggatgcccctgacaaggtagctgaagctgttgccactttcctgatccggcacaggtttgcagaacccatcggtggattccagtgtgtgtttcctggctgttagtgacctgctgtccacccctcctcaacatcgagctctgttgtaaatacgtcgcaccagaggccactgtgatgccactgtctcctctccatcccgcccagccatgtgacactggctcccggtagacgggcaccccaagatgtaccaaccttttcatgtattctgccaaaagcattgttttccagggcgcttgaccaacatcggcttctccagttcagggctcccctgctcctttcccttccctgtactggggtagctcctgcctgctctccctgcgttgcctagggtaaagcctccagatttgccatactgagccctcttcctagcatcaggcgatacatctgagttcaaatgtcttcccaggctcagggacctccattccttgagattgtcttggcatggcccagccctgcctcatgggatgncaatgcatgggtggtctttatttttccctttcaaataaaacactagtcagtaccgttttatcccagtcgtactcttccaggtttggaagacccagagaggccaagatcccatccttagccatagcgagcggtggtggtggatagcatcacaagaaacgagcctgaaaatcaggtccagccggtccaagcacatggcctcccatctgggagagcccactgtcccactcccacatgtctgggcacctgccctgggctgaggccaggctgctccaggggcctcctgcgccctcacctgccacagagcaacccaggttaaatacagcccatgcacaaagccacaggccaaagcctatggaattgtttttaatcatcaaatttaaccattttcataactggttcctggaggtgtgcagtgcccccttgcctcttcaaacctacagcttctctttgccatttgtggatttcacatcactccacacagaaacattacagcctggcatccccagtctttgccttcttccagctgcctcgacacagcactgtggcctgtccctattgcccaggcacgccatttccaagggcaggaaggggcagtgtcctgaagcccatcttttctgtgactgtcttaggtgatgtgtagccccctccacctttccactcaacaaccccccacccctgtcctgctgcatggtccggagtctgggacctactttgttttttgttatttangnccttgtttaaagaaaataaatatctcccaacctc

SEQ ID NO: 411 - DNA, 1961 bp, Homo sapiens
ctttacatcgtgaacctgcagtggaccccgaagatgactgggctgccctgaagctacatgggaagtgtgatgacgtcatgcggctcctcatggccgagctgggcttggagatccccgcctatagcaggtgagtgagccgctgcagcagcctgcttccccgcacctctgtgtgctgggccttgtctgtcttctctcgtgagctgagtgtggaggaagctctgaggtgtttgcagtggtgcctgaggcatgactgaagcgtggtggtctccagagggcctgacctcggtggttggcggagaccctgcgtgtgccactcctgccctggctgatgtggcacacacaatccccgcggggagagggattctgcccgcgtgctcctgctccaggcctccccgtggagctctccgagatgcctggtgggaagcatctggaggggacgagcactcggcagctctggtcagacagaatctgtgtgcttggttttgggagttggcgtactttgggaaagcttaaacaaactgtgccttaatacagaatttgtgataatttagacttggtgtatgtattgagtaaaaagtttacactctctttctctgtgaattttcagggtcttataggggaaatcaataacttcttttaatcaaagggttcaagaaattaaggatcccttcaccttctgggcctggcacttcttgtatgttatgtgtgtggtgttctgtgatgtgggctatcgtgtactgtattttttttttacattaacttagctcattttccttatcagtgcgtatctgtatcttaagttatgatctgtggttctgcatctccgtcagacacatgctttcttcacggggtcgtctgtaggccacgcctccctagtcagctgggaagggggagagggtctggtcacctgccccaccggtacaagtggaaggtgggggccagagttgctagtgactcatccctggagacggaggcagccctggggccactgctgccccaccctgtgtgtgcacgccgcctcagtggtggacaaggacacggagtttgaggagaccgagctagtgtgggtgccgacctttgagtcaccacctaagaggtgacctctcccacatccgttctgcagcttggtaacaatgaagctgccgccaaccagacccccgccgcagttgacacgggagggaaggggatgggaaggcagggaccgcagacagctttcccgagctggggcaggtgtgactgcgagaggctcccagccccgcctgatgccgctttccctttttggcaggtggcaggatcccattttctcactggcgactcccctgcgtgctggtgaagaaggcagccacagtcggaagtcgctgtgcagaagcagagaggaggccccgcctggggaccggggtgcaccgcttagctcggcccccatcctagggggctggtttggcaggggctgcacaaaacgcacaaaaaggaagaaagtgacgtaatcacgtgctcgatgaagaacagttggcactttgcagatggccagtgtcacggtgaaggctgggttccccccacgggtctagggagaacgaactctttggggatgacattttcaccgtgacatttttagccatttgtccttgaggaagccccttgcactgctgcggttgtaccctgatacggcctggccatcgaggacacctgcccatccggcctctgtgtcaagaggtggcagccgcacctttctgtgagaacggaactcgggttatttcagccccggcctgcagagtggaagcgcccagcggcctttcctcgctcaccaggccagtctcagggcctcaccgtatttctactactacttaatgaaaaagtgtgaactttatagaatcctctctgtactggatgtgcggcagaggggtggctccgagcctcggctctatgcagccctttttatttctattaaacgtttctgcactggc

SEQ ID NO: 412 - DNA, 1594 bp, Homo sapiens
ggggctgcgcggggccgggcgagcgggaccaggcgggagccatggaccgctagggcccggcctagccccgcgatgccgccggcgagtggccccagcgtcctcgcgcggctgttgccgctgctggggctgctgctcggcagcgcctcccgggctcccggcaagtcgccgccggagccccccagcccgcaggagatcctgatcaaggtgcaggtgtatgtgagcggggagctggtgcccctggcccgggcctcagtggatgtgtttgggaaccggactctgctggcagctggcaccacagactcagagggtgtggccaccctgcccctcagttatcgcttgggcacctgggtgctggtcactgctgcccgccctggcttcctcaccaactctgtgccctggcgtgttgacaagctgcccttgtatgcgtctgtcagcctctacctgctccctgagcggccggccacgctcatcctctatgaggacctggtgcacattctcctaggctctcccggtgcccgctcccagcccttggtgcagttccagcgccgggctgcccgcctgcctgtcagctccacctacagccagctctgggcgtcacttacgcctgccagcacccagcaggaaatgcgggctttccctgccttcctgggcactgaggcctccagctcaggcaatggctcctggctggagctgatgcccctgactgctgtgagcgtgcacctgctgacaggtaatgggacagaggtgccgctctcaggccccattcacctgtccctgcccgtgccctccgagactcgtgccctcaccgtgggcaccagcattccagcctggagatttgaccccaagagtgggctgtgggtgcgcaatggcactggtgtaatccggaaggaaggccggcagctctactggaccttcgtctccccccagctggggtactgggtggccgccatggcctcccccacggctgggctggtcaccatcacgtcgggcatccaggacatcggcacctaccacaccatcttcttgctcaccatcctggcagccctggccctgctggtgcttatcctgctgtgtctgctcatctactactgccggaggcgctgcctgaagccgaggcaacagcaccgcaagctgcagctctcggggccctctgacggtaacaaacgagaccaggccacctcgatgtcccagctccacctcatctgtgggggacccctggaacccgccccgtcgggggaccccgaggctccgcctccaggccccctccactcggcttctccagctcccgggacttggcctcctcccgggatgacttcttccgcaccaagccgcgctctgccagccgcccggccgccgagccttcgggtgcccgcgggggcgagagcgccgggctcaagggcgctcgctcggccgagggccccggcgggctggagcccggcctagaggagcaccggcgggggccctcgggggctgcggccttcctgcacgagccgccctcgccgccgccgcccttcgaccactacctgggccacaagggggcggccgagggcaagacccccgacttcctgctgtcgcagtcggtggaccagctggc

SEQ ID NO: 413 - DNA, 2361 bp, Homo sapiens
  misc_feature 2227: n = a,t,g, or c
cccaagtggtttcttgcctctttatttcccttatcagtctttcctgtgcacagattttcactttatttcttaaaaatcttctgcagttcctccttgcctaccaacttctttggcacttaagaccttttatagtgtagacctagctcttttttccaatttcatttcctgttattccctatgtgtaccgtatgagagacaatgggctttggaatcacagactgggattcttgtcccagctcagccattatttaactgtgtgcataagtaactttggaagagtcgcttaccttttctgagtctcaggatctcatttgtaaaatagttgatgtatgaataaggtaaactaaaatttctggtactacagtaccagacttagtaaatgttaatctcttctttcactttcctcaggtcagtttggttgccctgttcttggaatgctccatgttttcctacacttttgccatcacccttctgaacggtttttcactcccagcacttctgacaccaaatgcggagggtggagggactccctccacaccaaccaattttccagtaccaactgagtgtcctagaattcatttcaattctgatactaactacgcagagctagcctcagatgtgataggtttaagggctcattcccacaagactgccctcacatcagaggccagttgcaagtagcaggtttccaggttacccacaccttccgtcccacttgactacaaagttgggaattcccatgactctctactcaggttctataatttgctagcacgtctcacagaacctaggaaaacagtttacttacatgcactggtttattataaagaatacaactcagaaacagccaaacggaagaaatacatagagcaaggtatagggggagggcagagcttccatgcctctgggatgccaccctcccagcacctcagtgtgttcaacaacttggaacctctccaaaacctgtctgtggggtatttatggaggtctcattacataggcatgattgagtacatcattggcctttgatgattaactcaatctccaacccccatcccctctctagattcccagaggtggaactgaaggtaccaacccgctagtcacatggttggttcctctagcaaccagtgtccatcctgaagtgtctggggactcaccactagtcacctcattagcataaactctagtgtggttgaaaggggcttgttacaagtaacaaaagatattcctgtcacttaggaataccataggttttagaagctctctgtttggaagtggagacaaagaccaaatatagattcttattgttgcaactctataattccctcacccttattttcaccaggcaaaatttcttcgttttttttatagctcagttcagatttcactttatttgtgaaaccttctcatctgtccgctagttaaaagaggcctttctttcattctcatggttttgtctattgtaaagtactattattattggtttatgtatctttcttcaacccactgtgattttcttgagggcaggatctatttcttattcatttactatatcctcaacccctagtaaagtgcttttgcacatcctaggcattaagtaactaaatgatgagtaggatttgttttgctttaaaaatttattatattttagggaagggaacaacacacaccagggcctgttggaaggttgggggcgaggggagggagagtatcaggacaaatagctaatgcatgcagggcttaaaacctagatgatgggttgataaatgcagcaaaccaccatggcacacgtatacctatgtaacaaacctgtacgttctgccattgtatcccagaacttaaaaaaaaaaaagttaattatatttgaaaatgtagagtagacaggcaatcattgcaaatgtataggctgggcacgggtgctcacgcctgtaatcccaacattttgggaggccgagactggcagatcacctgaggttaagagttcaagaccagcctggccaacatggtgaaaccccgtctctactaaaaatacaaaaattagctgggcatggtggtgcgcgcctgtactcccagctactcaggaggctgagaggcaggaaaatcccttggacctgggaggcagaggttgcagtgagccaagatcacaccattgcactcaagcctgggtgacaaaaaaaaaaaaaagaactgttcattgggcgttttagaattagctaggcatggtgctgtgcagctgtagccccagctactcatgaggcttaggtgggaggatcacttgagcccaggaggtcgaggctacagtgagctgtgattgtgccactgcnctccagttggggtgacagagtgggaccctatctc

SEQ ID NO: 414 - DNA, 1933 bp, Homo sapiens
agctgagattgtgccactgcactccaacctgggtgacagagtgagactccgtcttaaaaaaaaaaaaaaaaagaaaagaaaaaagcctgatagagcaaaatgcgcactgcccgaaggtgacagaaacccatgttgatgttggttccagcaaaaggtgcatggggaagagaaaggcctgcgaggaaggcccagtcagaagccagccaggcccaggggtggcaggatggtggggacactgccctgcttctttctctgtgctttcctgatgttctagaatggatgagaaacctttaaaccagaaaaatgcagttgtattctaacagcgggaagaaaaggagccccggagacagccggctcctgcttggtctgattctggggccaccgcttgcgggcagtgaccggctgtggggtctcaccgtggggcttgcctagcaccaggcacttctaccagagcaagtggatctgcggcaggaggcctgtgttgctctaattcctggaaattgggtcatgggagcccaggcctggagctcctggaatgcagtgctctgagaattttgtccaaacacctctgacctccttcctccggggctggtccagcctctttcttcccccgcgtcccccatgctccagcctcttgggcaattgtcatactccgtatgtgagcctcaccttcctacttcccggcctttgctgatactggtcccctgccctcctgaagagcctgccccttccagcccagctgctgccagagccccctctccttaggaagcccctcctgcccctcccagacagaggtgcccgcagggcaggagccagggctgcttgtttcacctccatgctgaagcccagcgggcgtggtcatccctgttggctgatgttgttactgaccccggcctctaagtgcttttcccactatcctcctacacacgggtcaagttctgcctagtggtagcgttatttgtcattgcatctgagccttgatcctgggtggggtcagtttctgtttctctcccagcttctgactctgtacccagtacactttgtgcccggtacagagcactcatctgtccatccgttctttcagcaattactccctaagtgcctattgtgcgccggtgactgagctaggtggcaggggcacagctctgctgacatcagggtgggcggcttgcagtttgcttgcatgtgttttgtgcatgctacatgtgtatgcacacagcatgaacatctccatcacatataaactagcgtctcttaggctgcgcagtcctctaggcaccttgtgcattcctggttaattcagcgagtgttgacagagtgcccaccaagcaggtgccaggccctgacatgaagtctttgcccttgtgaagcacctgtcttgtggagccattgcagtgagagctggtgcagagggtgaagggcagggggttggggcagcatcctggagagatgggaaaggggtggggaagggaatttctgcctggctggggtgtgctttgggatcccctctgcggccctgggggcatcccaggcctaggaaagctggactgggccttctcgctttgggagtgcaggcagccccatctctttggttccgctgctctcaagagccccaaagagtgatgaggctaagaaggtaggagtgggcaggagccctgctgctgggcaccgcgaagagaatacgaagtacagtgtcccaaagaggagacacatggacacgacacgggacctgtgatggagagcaagcttgcttgcttccttcttttttcttttcttttcttttcgtttcgtttcgttttgtttcatttcgtttcttttctttcagacagagtctggatctgtttcgttttgtttcgtttcgtttcgtttctttcagatggagtctggatctgtcgcccaggctagagtgcaatggcaatctcggctcagtcgc

SEQ ID NO: 415 - DNA, 1862 bp, Homo sapiens
  misc_feature 696,877: n = a,t,g, or c
atttatttatttttattttttctgtactctcaccgaccactagcaatgtcatgcttagtgccatattaaatatttttaataatagctacggttaatgatgaatttggtgcatttttacccaacctgtccacacttcacctgtaagtgatcatgttttacctcatatttaaacaaagatatcacttcattcaggcagactatgaccctcttttcattccccaccattgggtattcctctcacttattctcttaaaaacctcttatagcacttatcaaacatgtcttttttacttttacacatactcctgaatagcacatgcctagcacatagcactcaataaactttggaattttttttcaattattgtcacatgttttcacttgactactggttattttctaggacacctctcttttactctgtatttcagccaagtgtacatatgtacatggaaacctacaaggtgttttgttttctaggatttggaaataaattatcttatacaaataagttttagcctagcaggcattgcttaaaaaccaaagtaatagtctgagatattaaaagatgttctatgaaattaaaataactgattgcctaaaaaatgtcgtttaaattacccacagggtgagctaagatttacaaaacttttcttagagcatttgaaattgttacctctttctaagaataaaagntttatagaatggggggtatagagtaaacacatattaaaggattcagagtgtcaaattcaaatatacatacatatatacacatatgcactgtattttacagtataagggaaaatcttcttaagttaatgtttacaaaatatatttgatgtagtcccattgatgaaatcttaccattactatncatatattttgaagataaaaaaactcatcatcacacctagtcatcacacaccgataatctttcatttattttttaaacactacagatcagttagtccacgcctagaaagtgttcttaacatattattgaaagttcaaggacctcttataaagttattttttaaagacataacttagttgataccataccaaacagacaccctacttaccacatctccaccctgtactttgttgagtaatgtaacattagtcagcttgggttgccataaccacaggctgggtggcttaagcagcagaaatttatttctcacagttctgaggctagaaagtccaagatcaaggtgccagtcattcatttcttggtgtgggctctcttcctggcttgcaggcagctgctttctcactgtgtcctcacctggccattcttcagtgatacaggtggagagacagagagagagagattgattgattgattgagggctcatcctcttcttataaggcacaagagcccactctcatgacctaatgtgatcatatttacctccctaaggacccatcttcaaatgccaccaagttgggagatacagctttttggaattacctatacttgagcatcatatacaagtctagcatgtttgtggactatgtcaggcacatgccagtgcctcaacagttattttcagttctacagtgattgtgagatatcaattttggattgaagtggacagacaccaaggcagctaaaactcaatgcccattgccaaatcaatcttagtaaccatcctaatgttttaaaacagctattgagtgcttagtttctgctgccagcagttatactcacacacatacacattctgattaaaacctttcagaaattccacaaaagaggtgctattttatgataaggaaatgtcaagggtcatatagaaacagtgtaaacttattaacactgaattcaagtctatgtgacctcaaagttcacaacc

SEQ ID NO: 416 - DNA, 2142 bp, Homo sapiens
gtggtttctaaggaatttgaatgatccagatttcaatccagtacagggaaatgatccatttgccaatatataggcatctccgaagatttattttgtcagtgattgtctttggctccattgtcctcctgatgctttggcttcctatacgtataattaagagtgtgctgcctaattttcttccatacaatgtcatgctctacagtgatgctccagtgagtgaactgtccctcgagctgcttctgcttcaggttgtcttgccagcattactcgaacagggacacacgaggcagtggctgaaggggctggtgcgagcgtggactgtgaccgccggatacttgctggatcttcattcttatttattgggagaccaggaagaaaatgaaaacagtgcaaatcaacaagttaacaataatcagcatgctcgaaataacaacgctattcctgtggtgggagaaggccttcatgcagcccaccaagccatactccagcagggagggcctgttggctttcagccttaccgccgacctttaaattttccactcaggatatttctgttgattgtcttcatgtgtataacattactgattgccagcctcatcttccttaccttaccagtatttgctggccgttggttaatgtcgttttggacggggactgccaaaatccatgagctctacacagctgcttgtggtctctatgtctgctggctaaccataagggctgtgacggtgatggtggcatggatgcctcagggacgcagagtgatcttccagaaggttaaagagtggtctctcatgatcatgaagactttgatagttgcggtgctgttggctggagttgtccctctccttctggggctcctgtttgagctggtcattgtggctcccctgagggttcccttggatcagactcctcttttttatccatggcaggactgggcacttggagtcctcgcatgccaaaatcattgcagctataacattgatgggtcctcagtggtggttgaaaactgtaattgaacaggtttacgcaaatggcatccggaacatgaccttcattatattgttcgtaaactggcagctcccgtgatctctgtgctgttgctttccctgtgtgaacctatgtcatagcttctggtgttgttcctttaactaggtgttactgcggaaatgcaaaacttagtccatcggcggatttatccatttttactgatggtcgtggtattgatggcaattttgtccttccaagtccgccagtttaagcgcctttatgaacatattaaaaatgacaagtaccttgtgggtcaacgactcgtgaactacgaacggaaatctggcaaacaaggctcatctccaccacctccacagtcatcccaagaataaagtagttgtctcaacaacttgaccttcccctttacatgtccttttttgtggacttctctctttggagatttttcccagtgatctctcagcgttgtttttaagttaaatgtatttgacttgtgttctcagcattcagagagcagcggtgtaagattctgctgttctccctggatcttctgacattactgctgtctgagatttgtatatgtgtaaatacaagttccttgataccctaaaaccttggattaaacagaatgtgcattgaacatctttaaacaaaaagtatattaatttattaaatctagttgtcactttattttggacctgctgtgatctcgacaggaaacgtgccacagagcagtagtgcgcaggcaagacttttcagtgacgccttgtggaacgcagttcatgatgtcctagcagctctcactaagggaactgtacattctttctttcttggctattcagaccttaccaagaacgttaaaggaaacaagtagaaatcagcagtggagtgtctgtggtaagaaaacatgaactttatgcttcactgttagttgtttgtggaagttattttgtataacaccaaagctgttgtacatttcctactgcctgatttttttcatgtgtctgtgtttgtaatattgtatagtatcttgtgctaggggaggaaattatttttaattttgataatttaatattcctagtgtgatcagcattgggagttgggtttcagtggggcatgtctatactttgaggg

SEQ ID NO: 417 - DNA, 1493 bp, Homo sapiens
atcctttgtaatatgcttttataataaaccagtatatgtaagtaaagtgttcctctaagttcctctaagttctgtgaattggtctagcaaattaatagaacctaaggagggggtcatgggaaccctgattaatagccagttggttagaactacaggtaaaacaacctgattcttgtggttggtatctaaaatggaggctagtcttgtgggactcacccctcaacctatgggatctgacgcggtctccatccaggtaggtagtgtcagaattgaactgaattagaggacacccagctggttggtgtctgctacagaattggttggttgcttggtgtgtggggacatatccctcacagaattatactgtgttgattgttgagtgagagaatagcaaaaatgctttggtttggtttgggttttttttttctctatatcctcaggcaagttttatttcggctttggaaaaaactgctgtttttcttcctgtgagccccagatgaagttgttggtttgtatttaggagtcacaatatgtaaaaaaatacaatgaatacaatcattcatgcatagtgagggaagtatttatattcagagaggtgcatgtgaatgaggatcagctaagggaaccgatatttaaattagttatctttcttctagtgtgtataggtgaattcaagataaatgcacatttgagaccctgcccttgtgctatggaaagataaataaatcaatactttttttttaacttcttttttttccccctcgccaggcaaggtcggtcttgtgctgttgcccaggctgtagtgcaatggccctcatagctcactgtagcctggaactccttggctgaagccttcctcccacttcagcctcctaagtagtgcaccatcacacctggctaatttttaaatatttttgtagagagagagtctcactgtgttgcccaggctggtcttaaattcctggccttaagtgatgctcccagcttggcctcccacagctttgggactgcaggcatgagccactgtgcctagcctgtttgtctgtttgtttgtttgtttgtttttaatagagttggggtctcaccatcttgcccaggcaggtcttgaactcctgggctcaaacaatcctgccttggcctcccaaagtgctcagattgcaggtgtgagctagtgcaccaggccttaatttcttttcttttttttttttctttttctgagacggagtcttgctctattgcccaggctggagtgcagtggcgcgatctcggctcactgcggcctccgcctcccgggttcaagcgactctccttcctcagcctcccgagtagctgggattgcaggcatgtgctactacgcctggctgattttcatatttttagtagagacggagtttcaccatgttggtcaggctggtctcgaacttctgacctcaggtgatccacctgcctcggtctcccagagtgctagggttacaggcatgagccactgcgcc

SEQ ID NO: 418 - DNA, 1690 bp, Homo sapiens
gtttctttagctgacagaatctctgaattttaaatcacttagtaagcggctcaagcccaggagggagcagagggatacgagcggagtcccctgcgcgggaccatctggaattggtttagcccaagtggagcctgacagccagaactctgtgtcccccgtctaaccacagctccttttccagagcattccagtcaggctctctgggctgactgggccaggggaggttacaggtaccagttctttaagaagatctttgggcatatacatttttagcctgtgtcattgccccaaatggattcctgtttcaagttcacacctgcagattctaggacctgtgtcctagacttcagggagtcagctgtttctagagttcctaccatggagtgggtctggaggacctgcccggtgggggggcagagcccctgctccctccgggtcttcctactcttctctctgctctgacgggatttgttgattctctccatttttggtgtctttctcttttagatattgtatcaatctttagaaaaggcatagtctacttgttataaatcgttaggatactgcctcccccagggtctaaaattacatattagaggggaaaagctgaacactgaagtcagttctcaacaatttagaaggaaaacctagaaaacatttggcagaaaattacatttcgatgtttttgaatgaatacgagcaagcttttacaacagtgctgatctaaaaatacttagcacttggcctgagatgcctggtgagcattacaggcaaggggaatctggaggtagccgacctgaggacatggcttctgaacctgtcttttgggagtggtatggaaggtggagcgttcaccagtgacctggaggccccagcaccaccctccttcccactcttctcatcttgacagagcctgccccagcgctgacgtgtcaggaaaacacccagggaactaggaaggcacttctgcctgaggggcagcctgccttgccactcctgctctgctcgcctcggatcagctgagccttctgagctggcctctcactgcctcccaaggcccccctgcctgccctgtcaggaggcagaaggaagcaggtgtgagggcagtgcaaggagggagcacaacccccagctcccgctccgggctccgacttgtgcacaggcagcagcccagaccctggaggaaatcctacctttgaattcaagaacatttggggaatttggaaatctctttgcccccaaacccccattctgtcctacctttaatcaggtcctgctcagcagtgagagcagatgaggtgaaaaggccaagaggtttggctcctgcccactgatagcccctctccccgcagtgtttgtgtgtcaagtggcaaagctgttcttcctggtgaccctgattatatccagtaacacatagactgtgcgcataggcctgctttgtctcctctatcctgggcttttgttttgctttttagttttgcttttagtttttctgtcccttttatttaacgcaccgactagacacacaaagcagttgaatttttatatatatatctgtatattgcacaattataaactcattttgcttgtggctccacacacacaaaaaaagacctgttaaaattatacctgttgcttaattacaatatttctgataaccatagcataggacaagggaaaataaaaaaag

SEQ ID NO: 419 - DNA, 1621 bp, Homo sapiens
  misc_feature 1335,1585,1587: n = a,t,g, or c
gtaattacttaataattaccacattcttgctcctcagtatctcttcccttgttccccctacacctagcaaattatttgactcatccagtcattggaaatactgagttcgaatcaaaatgctggagtgagaaggaatgttacacgtaggcagcctctccatgtagacatgaaaaaactgaggtccagaatttgtgccttatccaaagtcacaggtttatgtggtgatactcttcctctcctagagcctttaattataattattactattattatcatcaacagtttagcttttctctgccatctgagaagatgaactaacgaatggctaaagttagaagtttagaatggaaataaggtctgactcttgaaatccttccagcatctttttctttagcaactctgttccacaggcagtgggagaaaaaaaaaaaaattaagggtaagaataaaagactgaaggagacagctagctaagaacagttcagaaaattagacaaatattttggccacattaaactttagttttcccaaactttctgaaatgtaaatatcttttctttttttatattttgaagactcttctccaaaattttgataaatggctttttataataacttaaccaatctttagagaattccatattttcagactttcacaaaatcaggttttggaatctgtagaggccacagaccctatatatggtttgattcggttttatattacaacacagcttatgctactgtctaaaatgttgaataaatcaaagtatttatgtactaaagatatttaacctacacttatatttttcttgcagatttatgaaggtacttcacaaattcaaagacttattgtagcccgtgaacacattgacaagtacaaaaattaaaaaaattactgtagaaatattgaataactagaacacaagccactgtttcagctccagaaaaaagaaaggctttaatgttttttccagtgaaaacaaatcctcttatattaaatctaagcaactgcttattatagtagtttatacttttgcttaactctgttatgtctcttaagcaggtttggtttttattaaaatgatgtgttttctttagtaccactttacttgaattacattaacctagaaaactacataggttattttgatctcttaagattaatgtagcagaaatttcttggaattttatttttgtaatgacagaaaagtgggcttagaaagtattcaagatgttacaaaatttacatttagaaaatattgtagtatttgaatactgtcaacttgacagtaactttgtagacttaatggtattattaaagttctttttattgcngtttggaaagcatttgtgaaactttctgtttggcacagaaacagtcaaaattttgacattcatattctcctattttacagctacaagaactttcttgaaaatcttatttaattctgagcccatatttcacttaccttatttaaaataaatcaataaagcttgccttaaattatttttatatgactgttggtctctaggtagcctttggtctattgtacacaatctcatttcatatgtttgcattttggcnangaacttaataaaattgttcagtgcttattatcac

SEQ ID NO: 420 - DNA, 1661 bp, Homo sapiens
atgagattcgttattgttgcttttatgtgaatccttagtacatggcctgctgcaaacacccaggacaccgaggaaatggtcgttgctgtttgattttcctcatccccagtctcaaggggaagccaggccaatgagaagagccacttgccatcaggctgtccctttaggagtcactgaaagggccccagggtgggatggtggggagataagaaccacgagagaagttggcacaaaggagttatgggaaaaaggttccaagataggcagaaaagaagcttttgccagttgatgggggaagaaaggaagtcagagggcttagacagtgaggggggacagaacatctccatgtgcactctcatctcttggagtcagcaacaggtatctacggggagggccgtgcatcctctactaccctgcatggatctggaggtaagaggccctgggccgaggtgcagtgaccctgcaggccagccctccaacctcctcccacagcaggggcttgttgcccctctgccagctgaggcagcccacacacccccaccagccctaatgattattctctctacccctccccacaatctttctccaactccttctctcttgcatgcacctcagagccagtaccaagaactagcagtagccctggattcaagctccgcaataatcagtcaactcactgaaaacatcaattcactggttcgcacatctaaggaggagaagaagcatgagatacatctggtacagaagcttgggaggagcttgttcaaactcaaaaaccagacggctgaacccctggccccacagcccccagcagggccatctaaggtggagcagctacaagatgagaccaaccacctaaggaaggagctagagagtgtgggaagacagctccaggctgaggtggaaaacgatcagatgttgagtctcctgaacaggagacaggaggagaggctacgtgaacaggaggagaggctacgtgaacaggaggagaggctgtgtgaacaggaggagaggctgtgtgaacaggaggagaggctacgtgaacaggaggagaggctgtgtgaacaggagaagctgccagggcaggagaggctgctggaagaggtggagaagctgttagaacaggagaggcggcaggaggagcaggagaggctgctggagagggagaggctgctggacgaggtggaggagctcctggagcaggagaggcttcggcaacaggatgagaggctgtggcagcaggagactctgcgggagctggagaggctgcgggagctggagaggatgctggagctggggtgggaagccctgtacgagcagcgggccgagccacgcagcggcttcgaggagctgaacaacgagaacaagagcacactgcagttggagcagcaagtaaaggagctggagaagtcgggtggagctgaagagccaagaggctccgagtctgcagcagcagccagacagtacctggagccccagtcccacaaggagcttggatgtgcggacaagcagggtggactccccaggagcacccaggcttgagtggagaagctgttggtacaggagaggcggcaggaggagcagaagaggctgcatgccattcttttcgggctgcggagaacagggagctaaacatcaccatcatctaagagcgggtcaag

SEQ ID NO: 421 - DNA, 1851 bp, Homo sapiens
  misc_feature 131: n = a,t,g, or c
gacataatttgcccaagtaccttcctcaactctgaagagttcaagcgcctagtgagggagagatatgtttgagtggacgaccatatagcatgacaattcaagtgtatttttcaaagttgtgcgttatagangtctctagactcaacacaatttgtaggcacaacaggagaagtagacagaaaggagtggagccacaggaggcctcggagagggatgatgctcgaaaatacttaacataagaagtttgacaggcagaagcggtgagggattcattccgagcagagaaaaagagcaaagcacagattcctcaaagagcatggctttttcatgaagctgcaggaaattcatcttggcctgagcagagcaggtacacaagggaatgggaagatgtgactttgcttaggtcagctggggccagatggtaaaaggtttggtttgttatctaaatagtacgaattatttgatggaggatggaataacagtgtcactgatgggttttaaggtgagagagaggttgataagatcagattcagattttagaaaaacttatctggtagcagaatgtggagagtgtattagaaatgagcaagagtacagacaaggagacgctttaggagacgtttacagtattctcaaactttagtgtgcatggaaatcacctggaagtcttgataaaacacacattgttgcactctacccagagagtttcaaattcagaaggtctgcaatggggaagaatttgcattcttaacaagtttactggccccgcttgctgctcctgggatcctgttttgacaaattgcagacataaatataccataaaagcctgtcttaatcagtttgggctgctgtaacaaaataccataaactgggtagcttcaacaatatttatttcttcacaattctagaaactggaaagtctgacatcaaggtacaagcagattccatatctggtgagagctcacttcctggttcatagacagctgtcttctcactataaccttacaaggttgaaggggaagggagtgttctgggaactaacttataagagtaccaatcccattcatgaggctccaccctaaggacttcaagagctccacctcctaataccactgcattgaggattacaggcttgagcccccgcgcccagccatcaaaatgctttttatttctgcatatgttgaatactttttacaatttaaaaaaatgatctgttttgaaggcaaaattgcaaatcttgaaattaagaaggcaaaaatgtaaaggagtcaaaactataaatcaagtatttgggaagtgaagactggaagctaatttgcattaaattcacaaacttttatactctttctgtatatacattttttttctttaaaaaacaactatggatcagaatagccacatttagaacactttttgttatcagtcaatatttttagatagttagaacctggtcctaagcctaaaagtgggcttgattctgcagtaaatcttttacaactgcctcgacacacataaacctttttaaaaatagacactccccgaagtcttttgttcgcatggtcacacactgatgcttagatgttccagtaatctaatatggccacagtagtcttgatgaccaaagtcctttttttccatctttagaaaactacatgggaacaaacagatcgaacagttttgaagctactgtgtgtgtgaatgaacactcttgctttattccagaatgctgtacatctattttggattgtatattgtgtttgtgtatttacgctttgattcatagtaacttcttatggaattgatttgcattgaacacaaactgtaaataaaaagaaatggctgaaagagcct

SEQ ID NO: 422 - DNA, 1713 bp, Homo sapiens
  misc_feature 1497,1677,1679: n = a,t,g, or c
cttaaaaggaggtatttctgttccctcagagctctgggcagaagactatgcctgtggacaatgtagaattatctgctgaatgaatatctgaaaactgtttggagaggggaaaagcattgagaagaattgggctctttgctactattactcgctagaatgggagacgtttggaagcagttcccttaaggaaccaaacaaggcaggaaattctgggataaatctggtgttcacattacacaacaaaatgattgtacttcaagaaggaaagaaacagcaactcacgtggggcatggttttttagaactgatcaattttctgggttcttctcctggaggtgtgcaaagtccagagaagccagtgctggacaaggaaaaaaagccacaagattagacttggctcacagcccacaaaataaactacttagaactacctttacttctcctcttttgggaatttggaaaaaatctcagttcttccacaaacccaatggaagccagctactgcagaaggggttcaggcagacctttccttaatgtccatgttgaacaggaccctaggtgctgttactttcccatggcatctcctcttccacagtagaacagaggcatgcccagggagccccccatcatcctcctggacccaaacactaagtcaggtactttgctcccaatcttaggaaggggcttcagagaccaaaatgtggccttctttcagacgtcatgaacatcagctagactcacagacattttgacagacatatcagggtcaacagatccaaaacagtctcatcccactcccctgaatctagttctttcttgcctgtttactcttccctataaaagaaaattcctttatgcctgacctttgctatgcttgcagatcttatggctggagtattctcccaattacaacacctcctcccttactgcagtgttcctgtgaataaagtcattccttaccaaagtctggatttgtttttttatttcacaggttgaataacttttgtagaataacaaaacaaactattttaactgtaacctaattctccaagccatggcacacacagaagcacggagggtcaaacaggagcaacatccacatgacagccaatgtgcgcacagcacgccccctcttgcaatatgacttcaagattgagcaagttccccaactagagccacctacttgccatagttgtgtagcactgatcttttttttttttttggtagcattgatcttgcatacatgtataatccatgaacttaacatcaatgttacttgtgtgataccaagaaaacccagtaagagagcaggtaaataatttaagtaagattttgttgggtatagttgagctttgaagcaccataagccattgtactaagattttgtcctccccactaaccaattttcacctcctttgaggcaatatcatcgtcattaagaatacatgggttggctgcacgcagtgctcacgcctgtagtcccagggaggccgaggcnggcagatcacttgaggtcaggagttcaagaccagcctggccaacatggctactaaaaaatacaaaaattagccaggcatggtggcacatgcctgtagtcccagctacttgggaggctaaggcagaagaatcacttgtacgcgggaggtggaggttgcagtgacccaagattgcgccactncnctccagcctgggtgacagagcgagactccatctc

SEQ ID NO: 423 - DNA, 799 bp, Homo sapiens
ggacaaatcagcagtggaggctacttgaactccctctgtgctctcacacacctttgtgcatgaattcttttcccaattttatcttccctcaaaaaccaccttctctttcaaaatacactttgattattgttacttatgcctgggtcttattacccaagatggtaaattccttaaggtcaaggatggtgtctttaatcatttataattcccaaaaaatacacagaagaatgctttgcataagtactttgcccatttgaataggataagttgtgaactacctcatgatttaacttccctctcaccaccgtcatgctcgtttggaggcccaggaacacacagatcaggtgacaatgcattcagctgcaggggtaatcattcacattcacacgcatgggactatgctaggcaatatcaaacagcactggcctaagaacttggcttttcaacatccatacctttgactacaaatcagtagagtttatgttatcattaaaagattcaacttttggctggacgccgtggcttatgcctgtaatcctggcactttggggggctgtggcgggcggaccacctgaggtcagcagtttgagaccagcttggccaacatggtgaagccccatctctactaaaaaaatatatatatataaaaatcagccaggcatggtggcgcgcacctgtggtcccagctgcctgggaggctgaggcgggagagtcgctggaacccaggaggcggagattgcggtgggccgggatcttgccactgtactccagcctgggtgacagagtgagactccatctc

SEQ ID NO: 424 - DNA, 1688 bp, Homo sapiens
ctggaacccgagccggagccggagccacagcgggagggtggcctggcggcctggagccggacgtgtccggggcgtccccgcagaccggggcagcaggtcgtccgggggcccaccatgctggtgactgcctaccttgcttttgtaggcctcctggcctcctgcctggggctggaactgtcaagatgccgggctaaaccccctggaaagggcctgcagcaatccctccttccttcggtttcaactggacttctatcaggtctacttcctggccctggcagctgattgggcttcaggccccctacctctataaaactctaccagcattactacttcctggaaggtcaaattgccatcctctatgtctgtggccttgcctctacagtcctctttggcctagtggcctcctcccttgtggattggctgggtcgcaagaattcttgtgtcctcttctccctgacttactcactatgctgcttaaccaaactctctcaagactactttgtgctgctagtggggcgagcacttggtgggctgtccacagccctgctcttctcagccttcgaggcctggtatatccatgagcacgtggaacggcatgacttccctgctgagtggatcccagctacctttgctcgagctgccttctggaaccatgtgctggctgtagtggcaggtgtggcagctgaggctgtagccagctggatagggctggggcctgtagcgccccctttgtggctgccatccctctcctggctctggcaggggccttggcccttcgaaactggggggagaactatgaccggcagcgtgccttctcaaggacctgtgctggaggcctgcgctgcctcctgtcggaccgccgcgtgctgctgctgggcaccatacaagctctatttgagagtgtcatcttcatctttgtcttcctctggacacctgtgctggacccacacggggcccctctgggcattatcttctccagcttcatggcagccagcctgcttggctcttccctgtaccgtatcgccacctccaagaggtaccaccttcagcccatgcacctgctgtcccttgctgtgctcatcgtcgtcttctctctcttcatgttgactttctctaccagcccaggccaggagaggccggtggagtccttcatagcctttctacttattgagttggcttgtggattatactttcccagcatgagcttcctacggagaaaggtgatccctgagacagagcaggctggtgtactcaactggttccgggtacctctgcactcactggcttgcctagggctccttgtcctccatgacagtgatcgaaaaacaggcactcggaatatgttcagcatttgctctgctgtcatggtgatggctctgctggcagtggtgggactctttcaccgtggtaaggcatgatgttgagcttgcgggtaccttcacctactgaggagccctatgcccctgagctgtaaccccactccaggacaagatagctgggacagactcttgaattccagctatccgggattgtacagatctctctgtgactgactttgtgactgtcctgtggtttctcctgccattgctttgtgtttgggaggacatgatgggggtgatggactggaaagaaggtgccaaaagttccctctgtgttactcccatttagaaaataaacacttttaaatg

SEQ ID NO: 425 - DNA, 3075 bp, Homo sapiens
gaacagtgacagaacctggattttaatctcccttggcctccaatagctgtgcatgccccaggactagattcctgaagtcatgggctggccaggacattggtgacccgccaatccggtatggacgactggaagcccagccccctcatcaagccctttggggctcggaagaagcggagctggtaccttacctggaagtataaactgacaaaccagcgggccctgcggagattctgtcagacaggggccgtgcttttcctgctggtgactgtcattgtcaatatcaagttgatcctggacactcggcgagccatcagtgaagccaatgaagacccagagccagagcaagactatgatgaggccctaggccgcctggagcccccacggcgcagaggcagtggtccccggcgggtcctggacggtagaggtgtattcaagtcgcagcaaagtatatgtggcagtggatggcaccacggtgctggaggatgaggcccgggagcagggccggggcatccatgtcattgtcctcaaccaggccacgggccacgtgatggcaaaacgtgtgtttgacacgtactcacctcatgaggatgaggccatggtgctattcctcaacatggtagcgcccggccgagtgctcatctgcactgtcaaggatgagggctccttccacctcaaggacacagccaaggctctgctgaggagcctgggcagccaggctggccctgccctggctggagggacacatgggccttcgtgggacgaaaaggaggtcctgtcttcggggagaaacattctaaatcacctgccctctcttcctggggggacccagtcctgctgaagacagatgtgccattgagctcagcagaagaggcagagtgccactgggcagacacagagctgaaccgtcgccgccggcgcttctgcagcaaagttgagggctatggaagtgtatgcagctgcaaggaccccacacccatcgagttcagccctgacccactcccagacaacaaggtcctcaatgtgcctgtggctgtcattgcagggaaccgacccaattacctgtacaggtaagcctgggaatgggctatacccagcactgaacaggagggtgcttaggtcatctacctcaggaggaactcttgaggtggcagaaaggcaatagattctagacgcattcacctctgtgggtaagcatagggactctgggcccagctgtaaacacaggggaacctgagttgaggggtgatgaagtgaccctaacctatccctgggctccccaggatgctgcgctctctgctttcagcccagggggtgtctcctcagatgataacagttttcattgacggctactatgaggtgagcaggacttggggggtgcctcgggtggagtacaacatggagcagcagtgattgccagggacgggcaagggagaccgcccaggcaagggctgtgaaatgtgaaggccttggattgcagaggtgggcagagggaaagtgacctcacatggtgagcagtggccatgtcccccaggaacccatggatgtggtggcactgtttggtctgaggggcatccagcatactcccatcagcatcaagaatgcccgcgtgtctcagcactacaaggccagcctcactgccactttcaacctgtttccggaggccaagtttgctgtggttctgaagaggacctggacattgctgtggattttttcagtttcctgagccaatccatccacctactggaggaggatgacagcctgtactgcatctctgcctggaatgaccaggggtatgaacacacggctgaggacccagcactactgtaccgtgtggagaccatgcctgggctgggctgggtgctcaggaggtccttgtacaaggaggagcttgagcccaagtggcctacaccggaaaagctctgggattgggacatgtggatgcggatgcctgaacaacgccggggccgagagtgcatcatccctgacgtttcccgatcctaccactttggcatcgtcggcctcaacatgaatggctactttcacgaggcctacttcaagaagcacaagttcaacacggttccaggtgtccagctcaggaatgtggacagtctgaagaaagaagcttatgaagtggaagttcacaggctgctcagtgaggctgaggttctggaccacagcaagaacccttgtgaagactctttcctgccagacacagagggccacacctacgtggcctttattcgaatggagaaagatgatgatttcaccacttggacccagctttgccaagtgcctccatatctgggacctgaatgtgcgtggcaaccatcggggcctgtggagattgtttcggaagaagaaccacttcctggtggtgggggtcccggcttccccctactcagtgaagaagccaccctcagtcaccccaattttcctggagccacccccaaaggaggagggagccccaggagccccagaacagacatgagacctcctccaggaccctgcggggctgggtactgtgtacccccaggctggctagcccttccctccatcctgtaggattttgtagatgctggtaggggctggggctaccttgtttttaacatgagacttaattactaactccaaggggagggttcccctgctccaacaccccgttcatgagttaaaagtctatttatttacttccttgttggagaagggcaggagagtacctgggaatcattacgatccctagcagctcatcctgccctttgaataccctcactttccaggcctggctcagaatctaacctatttattgactgtcctgagggccttgaaaacaggccgaacctggagggcctggttttctttttgggctggaatgctgccctgagggtggggctggctcttactcaggaaactgctgtgcccaacccatggacaggcccagctggggcccacatgctgacacagactcactcagagacccttagacactggaccaggcctcctctcagccttctctttgtccagatttccaaagctggataagttggtcattgattaaaaaaggagaagccctctggg

SEQ ID NO: 426 - DNA, 2164 bp, Homo sapiens
gtcttgatctcctgacctcgtgatctgcccgccttggcctcccaaaatgctgggattacaggtgtgagccactgcgcccggccctattttgttttttacagcatttcttggatatcatttaagtacaatttttagatgtaccagaatccagtggtgcaatgagaatagaagatggtagcatgtttaccttttattgttctaggtggttatcaaaattaacatatggctcagaatatcatcctggagtcttgaccgatgacagcgaaattatttgtcagcctggaaattttcatgtcctaaacatataccagttatgggagtgttcatgatttaagaatcataggtattctatgaatttttggctgctcttaaacatttgtcaataaactaatgttggttgggacctaccataaagtgtagtttagatattgatataccactcatacataatacaaatggggacttttaatgacagtcagaaaaacgagaatgattcacattaatttcgagccttctatgtgtcctgcatcacccagtaggtatttcacatatgctatatgttttttattacaaaaataacactgcagagagcccataactgttttccaggaatcctgaattttctctttagtgatgctacacatacttactttggacatcagcaatctaactgccggctttgcaaactcattcttcaagaggcaagtcattcttggtaacagcgtcctcaggaatgaagctcctgcagttgaggttcagtgaacgctgcgtcagggatctgcgcagcacgtgtggaacccaatgagagtccttgctgtgcaggcaccgggatgctcacatagtaaaaactcgagtccatcgggaagcccaggaaaggatttaaaatgacgatcacgtggcatctctcagggccaaatggggcgcatcaaagcttcccctcgacgtttattaactctgcagtccgttctctacgtctgcgaagaattggcagataacgatgtgtctgagagaagaggcgttttctaaggagacacacaaagggagtgggaccctccaacctcactctgtgagaggaacacagcacagcagtgtgggggctcgaacaccccaagagcggcagagcgcggttcagaaaacatgacccttgaaatgcacacaaagcctaacaacgtgtcctccgcggaagaaaacagcttgaaaaggtcggctttgaagtgacccagcggaaaggaatcaccctggaagaaacacgcagcagccccggggcaatgcgcgggcaggaggagcagcgagcgcggggagcgccacgcccaccggtcccctgctgagcctagcaccgcccatttagacccagcaccacccgtccggaccgaacctagcaccgcccgtccggacccagcagcgcccatttggatactgcaccgcccgtccagacccagaaccgcccgtccggacccagtaccacccatcggacccagccgcccatttagacccagcaccgccagtccgaaccgaacctagcaccgcccatgggacccatcgcccgttcggacccagcaccgcccgtccagatccagcactgcacccccatttggatccagcaccgcccgtccagacccggacccgccagtccggaccgaacccagcaccgcccatcggatccggcgccgcccatttagacctagcaccacccatccgaaccgaacctagcaccgcccatcggacccaccgcccgtctggaaccagcaccgcccgtccacagatccatcaccacccatttggacccagcaccgcccgtccccgcccgtccggaccgaacgcagcaccggccatcggacccagcagcgcccatttagacctagcaccgcccgtccgaaccgaacatagcaccgcccatcggacccatcaccgcccgtccagatccagcaccgcccatttggatccagcaccgcccgtccggactctgcaccgcgcgtccggacccaacacagcaccacccatcggacccagcactgcccatttagatccagcagcgcgcgtccgaaccgaacctagcaccgctggtcgggaaggaacccggtaccgccggttgggacccaccaccgccagtccagacggaaccctagcaccgcgcggggcccgccctccgacacctccctccctg

SEQ ID NO: 427 - DNA, 2677 bp, Homo sapiens
ggcccctaggctgggtctgggtgcttggcggcggcggcttcctccccgctcgtcctccccgggcccagaggcacctcggcttcagtcatgctgagcagagtatggaagcacctgactacgaagtgctatccgtgcgagaacagctattccacgagaggatccgcgagtgtattatatcaacacttctgtttgcaacactgtacatcctctgccacatcttcctgacccgcttcaagaagcctgctgagttcaccacagtggatgatgaagatgccaccgtcaacaagattgcgctcgagctgtgcacctttaccctggcaattgccctgggtgctgtcctgctcctgcccttctccatcatcagcaatgaggtgctgctctccctgcctcggaactactacatccagtggctcaacggctccctcatccatggcctctggaaccttgtttttctcttctccaacctgtccctcatcttcctcatgccctttgcatatttcttcactgagtctgagggctttgctggctccagaaagggtgtcctgggccgggtctatgagacagtggtgatgttgatgctcctcactctgctggtgctaggtatggtgtgggtggcatcagccattgtggacaagaacaaggccaacagagagtcactctatgacttttgggagtactatctcccctacctctactcatgcatctccttccttggggttctgctgctcctggtgtgtactccactgggtctcgcccgcatgttctccgtcactgggaagctgctagtcaagccccggctgctggaagacctggaggagcagctgtactgctcagcctttgaggaggcagccctgacccgcaggatctgtaatcctacttcctgctggctgcctttagacatggagctgctacacagacaggtcctggctctgcagacacagagggtcctgctggagaagaggcggaaggcttcagcctggcaacggaacctggctaccccctggctatgctgtgcttgctggtgctgacgggcctgtctgtgctcattgtggccatccacatcctggagctgctcatcgatgaggctgccatgccccgaggcatgcagcaaacctgtctcctgggactctagaccgagcacttcttggactttgtctcctttgggactctgagcaacgctgatgggaagtggggcaagttttcatcaacctcaggttcagaaagaaggaaaagacttaattttgaaaggagggctggtggttcagtagaatctgatcagaagaaaataaaaagaggccaggtgcagtggctcacacctgtaatcctagcactttgggaggctgaggcgggtagattgcttgagtttaggatttcaagaccagcctgagcaacatggtgaaacccggcctctacaaaaagtacaaaaaattagccagacgtggtggtgcgtgcttgcattcccagctacgtgggaggctgacgtgggaagatcgcttaagcccagaaggtcaaggttgcagtgagctgaaatcgcaccactgcactccagcctgggtgacaaagtgagaccctgtctcaaaaaaaaaaaaagaagtgggctgggagagagctctgttccctttgagatgagttattaattcttggagccagccagttcttccttaatgcagtggcagttacctaatggtgtcctcagttgtgggcttctatagctctccactcttccggagcctgcggcccagatggcacgacactgccatgacgcaggtagctgggagggagtaagggaagctcccggggggtgtggatgggcactaggtgcctgcagctcttccaccctcacctctcctttccctgcttccacccagataattgggaactgtgtctgtctcctggtcctaagctcagcacttcctgtcttctctcgaaccctggggctcactcgctttgacctgctgggtgactttggacgcttcaactggctgggcaatttctacattgtgttcctctacaacgcagcctttgcaggcctcaccacactctgtctggtgaagaccttcactgcagctgtgcgggcagagctgatccgggcctttgggctggacagactgccgctgcccgtctccggtttcccccaggcatctaggaagccccagcaccagtgacctccagctgggggtgggaagaaaaaactggacactgccatctgctgcctaggcctggaggaagcccaaggctacttggacctcaggacctggaatctgagagggtgggtggcagaggggagcagagccatctgcactattgcataatctgagccagagtttgggaccaggacctcctgcttttccatacttaactgtggcctcagcatggggtagggctgggtgactgggtctagcccctgatcccaaatctgtttacacatcaatctgcctcactgctgttctgggccatccccatagccatgtttacatgatttgatgtgcaatagggtggggtaggggcagggaaaggactgggccagggcaggctcgggagatagattgtctcccttgcctctggcccagcagagcctaagcactgtgctatcctggaggggctttggaccacctgaaagaccaaggggatagggaggaggaggcttcagccatcagcaataaagttgatccccggg

SEQ ID NO: 428 - DNA, 3213 bp, Homo sapiens
gtgtgcatttctcggggccactgggtggggatgctgtcaggcaggcctgggttcaaaccctggctccccctgacattctgcctaagggcaagtggctttacctttctgggccctggcttcctcatctctgaagtggagatgttcctgggatgaaatgagaaaatgtgtgcaaaatgctggtcacaaggcctggtgcgtggagtctctgctccgattatgttaacggtggctcttcccaacattctggacaccccctctcctgggcctgtccacacggctgccatgctttgctcttgcggctgtcggagcctccttggcctgtggccttgcgtgttttcctgtaggctggcaggctctgtgggtctgaggctcacagcttggggcagcccactgggtggcactactcctgaagctcctcccagccttccctgaagtcaagtgaggggccatgagggctggggaagatgtggaataccttggacagagtgaggacaagaccaaacagcgccccctaagagggggtcccctagtgcccctcccctgtggctggtggaatcccagactgagcctcagtttccccatctataaaatgggtacgataatgcctacctggctgaaatgtttaacaacaagatgcaggttctgagaggaccaggcagggagggagcaattgtcctggcccggcccctggggtggagggaggagggtcggaggaagaagcaacggacagcccagagcaataaaggtttatctctcttgtccttgaattgccattgctgcctccctctcacccagacttcatttccggctgtcactcagggcccctggtgggctcaggacaaggctcgcctgtgttatgacggactcagccctggagtcagagatgaaggacggaggcctgggtccaggccctcgctgtgctggtggggcacccccgacaaggccctccgtgggtctcagttttcccatctgcgcagcatgggcttggttctcaactacagtggccactagcctctgggtgggaggggctaggggtgctaggaaccctgcagtgtgagagcagccccgcacaagcagaatgccccaactctagtgccagtggtgccccactgagagacaatgtgagggacctgcaggcctggccctgcgttgggaagagcatgtggtgaccgtgagtttgcaaaacgcttccaaggtctctgatcctcactcctcacaaggggcaaagtgaatctcagacagatgtgacttgcctagggtcacacagcttgtgggtggtggagctgggattcgaacctgggcatgtctgacctgtgtgcttagctcccttgaaattctgtttctggcctatttgacggcgttagtttgagacttttggcgggcaagtgggtggatgaatgctttctgtttcattaatacgtggtcttcccaaccctagagggtaggtgtttttattattctcattctacagccgaggaagctgaggtccagagagatttggacaagtgccccgatcacacaggaatccgtcttccagttgtctcacaaacctggggacatggaagtgtcagggcccctcctgaccaaagaggggctgcctgccagctcagtggccctgccatctcccctgggctgctcagccccctcgcatgtcacccacagcatttgaaacatggggcagtcagatgctgtcctcaggagcccctggtggcctgggtgcttggcaggcctggcttccagccaccttgcatgcccaggcaatctgttccccttttcttctgcttccctgaagttggcagcattggacaagaaggatcgtctttggagggtgatcaagcagcagctttgcctcttctcatgtcctagaaggagcccttgctgctcattcctaggccgcctcccagacggaaatccttctctcacctactgtcagcctgcactctgtgtttgaggtgcttgcaaagctgtctcaccccgctgcactacagctatccttagctctccatttcctgcaggatgaaagacaaactctttaatacagcgctcctcaaacttcatatgcatcacctgaggaccctcttaacatgcagcttttgatttggcgggcctgggcggggcccgagcatctgcgtgtctgacaagctccgggtgatgcagatgctgctggtcctcagactgcacttggaggagcgagaccctagtagaccaccccaggcctggctgtatctctgtttccttctttgtctcctcacttagtcatgtgggatttcggccatggactcacacgcgtgcaatggctttttccttcgtggacaaactccttcccatccttcaaagtcagtctaaaaaacccttctcagtggactcccagacagagctaattcctcttcctctgcacacccagaagctttacaaatccctgaaatcctgaggcccatagcagtgccattaagaatagcggtgctggtgccaggcctcctgagtgtgaaacttggctccatccttaccagctgtgtgaccttgggcaagttgcttaacctctctgtgccaagttatttatttaaattctgtcttgttccaaaatgggccaataattgcttctgaacatgcacttggataaaatcaaatgaaaatgtgctcagtagggtgtcgaggacagagggcaaaggggagatgctgtttcccatctgcctacattgcatagcatggcaagcactcagagaaacgccacagaagctctcccataatccacggcatgacctttccaggagcttgggggtccacaaaagtaaactccaaaggagcagtgagagagacagaaatgtggcaaggcttccaattgccaatcttaatcactcatttaaatgcatctgtatggagagcaaattttttttaagagaaggagcagagaaatgaggcaaggcttccaattgccaatcttcatcactcatttaaatgcacctgtatggagagcaaattttgttttgagaaggagcagatacaggagtttgagaccagcctgggcaacatggtgaaaacctcatcactacaaaaaatgtaaaacttagccaggcatggtggcacctgcctgtagtcccagataccagggaggctgaggtgggaggatcatctgagcccagccagtgtgttgcagtgagtggagactgcgccactgcactccagcccaggtgacagagtgagacgctgtgtcgc

SEQ ID NO: 429 - DNA, 1695 bp, Homo sapiens
gtcttaaaccaaaaaacaaaaggaggttgaaggacgtgctgctctgtgggatataggagaaggggtgccgacagatcttggctgagggtgactcagggatgggaggtttggggtatgcagagaattccccagcctgccttctgcgtgtgggtccctgggtgtctgcttcaagcgctgcccatctggcttgagctctcattctatggccacctggggcaagtgctgagtattcctccatcctgtccccgagtgagtacaaatgtcagtgctgctagctcagcaggtttaattacaagggacccctcagggtactctgtgagcatagaggagtgtggccctggtggggacacaggcatgcatggatgacagtgctgtcagcctcatcttattctgacctgggctcagccaggagtcacattaaaggtatcatcatggagtcctcccacctcagttcatgacatttcctccaggaaatgtgggatctgggactgatttggttaccatgatctctataacttgggccagccatataaaactgccatggacctcagtttttgtttatatatatttttcctttcaaatttgtcttgtgccccagggggcaacaggaccagtttctcagggttttggtgaagatcagatggaattagggatgtgaaaagatcttgaacagtttaaagcatagagaaagtgcatggagtatcattcgtccatccatccagtcatccatctactcaatgaacatttattattattattttattttttgagatggagtttcgctcttattgcccaagctggagcgcaatggtgtgatctcagctcactgcaacctctgcctcctggatttaagtgattctctcacctcggcctcccgaatagctgggattgcaggcatgcgccaccatgcctggctaattttgtgtttttagtagaaatggggtttcaccatgttggtccggctggtctcgaactcctgacctcaggtgatccactcacctcggcttcccaaagtgctgggattacgggtgtgggccaccatacctggcctcaatgaacacttgtttaggtccttctaagggttgtggatacagcagtgagcacagcaggtcaaaatccttgccttcataaggctgacattccagtcaggagagcagaaaatgacacataagaaaaatatatagaatggcagttgctgattagagctatggagaaaaagcataaagctgggaaaaagatagagagctccaggaaagggggttgctattttaatagggtggtcagagggagcctcactgataaggggacatttgggatgtgacctggaggagctcttgttccagacagagggaacagcaggcactgaggtcccaggctggcctgtgtggggtgtgttgggaaacagcaaagaggttcttgtgactggggtgcagtgaggaagctgaagagccttaggattatcactgttagctggtggcagatcatgaggtcaggagatcgagaccatcctagctaacacagtgaaactccgtctctactaaaaaatagaaaaaatttccctgggcatggtggcaggcgcctgtagtcccagctatttgggaggctgaatggtgtgaacccgggaggcggagcttgcagtgagccaagatcgtgccactgcactccagcctgggtgacagagtgagactccgtctc

SEQ ID NO: 430 - DNA, 2576 bp, Homo sapiens
  misc_feature 2541: n = a,t,g, or c
caacttttcactaatatctgaataacatttgaaaaattgacaactcttctggctaaagatcagcatacacattcgttccacagagacttgtgccaaaatcttgctcagctcaaggggtactgcacaataaacaataagaaacttttataactccgactaatagaactcattgcttttccagtttgaagataaaggatgtctgcttgctttccatgcctaattttcctgatgctgtaaagctgttcaggaaagttcccactgcaggagttttgctagtaatcttcagctccgtgggaagcctttggactctgttgctatccctgaaagtggctgttcttctccatcagtttcctgggcaagggctcgaaccagctattagtgtctatttgcactgcatgaaaacaaaatttaatgtaaagacgcttatagcttgcctaccctaaaaccccaggagtctcattctgcctgaccctggacattttttgaactgatagagggatgggtatctggtgggtctcttcagtcagctcatctcagcatgttgaaagtccaaatgacccttgcctgaggatggtgaaagtaatttgtatgtgtgtatacataatcctgctttttcactatttccagtcacagattgcagagatagttgactgtgcttgttagtgtgagtgttaataactttgctatgctgatttttagacttcctatgctatatgatctccctgaagagcatgacagagcattgctttggaaaatcaatattcggcgtgattattccttctttcatgtgtaatcaaactttgaagaccaccaataggccaaatctacaagcattaggtttctaaacatattgtttagtcaggagaaattgtgttttctagctgaggtatgccagctactggtatggagaaaatctgcctagcaaattggaaggggccagaagctcaaatgctattgagaaccactcaacaattcttttttcttatacacaggattgaagcacagagcaaaaggaaaatccagctttgggatttgttcccttgaacttacaaatgattcattagaccaatgacattgtgagaatttggtctctgacaaagaaataaatgttttaaaaatagtgctaatacataggtacaaatacagaattatgtcaggcatgtatttttttaaagatagagtccagtgaaaagaatacgtgttagaatatggattaggtttctaaaggtatacttatgtctgccttcgtcttcagaaaacaaagttgtatgtacactttaagaaaggtcttagtgtggtaaacgtgaggcaaaccaaagtcctgttacttcttttgtcatatcattaaagcctccagacggaggtttcttcccattatgtgatgtgcagaatttcagatgtcagtcagcagctgaagtcaactgttggtccaccaggcctctaagctgcagcctctgtcagcttggggacagtgggatccatgtgacttgcctgctactgcccttgattgggcagatcacagagcagatggcctgtgtctagagtacaaggtgttaaggctttttttttggggggggaagaaataattcacatgtgctaatattcctggatgtttcactgataatataatatagaatgtatgaaaaaatcaaagtcaattagaaccagaaatctcctgatactggatgattctatacataaatatcttgcactaacagcaagaataataaaagttgtacaaaaaatgtctgttcttccccagaccatgagctccatggaggcagagaccttatttggttggtttactgcccttccccaatgtttctaccaagctgaacatgtatccagctctcagtgccccattgagttgaaataaattacagtgacataaactatgttcttcatcaaatgctggacaagcacgtttctcaggcaacttctctgggatcaacataagaacagggtgatgaaatgtgagaagcagtgagggcaaggacttgagcctggtgcctacctaaagtttacactccacaagtattccacccaacacttcagataccttctcttctttcaaagtcaacagtttatgcccattgaaaataaatacacacacccactcatgcccataggcatgtgtgtgctaccagaaaatatgtacatgttaggctctttggaagcagtggtagtttggtgagaattgctgcattggctcatcaacacagacctgatcgcactttgatttcatatcttgctatgcagggctcccattatctgcctgccatttgtgtgcatttatgtttagcgtcaatttctcctcccatgaggctataatctgccttgtaaggagctaaaatgggaaaagcagttagaatgatgagtccagttggagcctgctggggaacaagacagtcatcacaggccaatcggcagtggagacagggtggcccttatcacacagaggcatctggagactgagagagacaaagcaacacagctgcaagccgaccatgatctgctggaagcctcttcagtcataaagcnaaggacagtaattctgaatgacaatgtaggaaaac

SEQ ID NO: 431 - DNA, 2624 bp, Homo sapiens
  misc_feature 2589: n = a,t,g, or c
cgttatgtgtgtattagcaaaatgctggtgtgcctgggagctttggggcaatgctcaccagctcctgagttctcgggagtgaagtttgggactggatgcctcttgcattctgagcctctcactcctgtgtctttcctcttgcccttcagatgtttgctgacagccatttctctcccgaactgtctgccagcccagactgacctgtctgcttctcctgctcagcgcccagagcaccctgtctgtttatgcctggggccggttttaactggtcccccagtcccatgtcacacacacctgttccctttggcttagctgcagtgtcacctctcgtccctgtttccttcctctctatgaggctgaaagtcaatgttacttggagatacagcactccacagcctacagtcattgctcatttaatctttgcagggagtgcgtgaggtcagtaggtaggcattatcgtgctcattttacaaatggaggacctgcagcccagagaggtgtgatttgcccaaagacacacagctgctctgctattgagcacagccagtcctggaatcaaggtcctccagcattggtccatcattccctgtgaaatgttagtgcaggctgggcttggtggctcaggcccgtaattccagcactttcgggggctgagacgggaggattggggtcaggagttcaagaccagcctgggcagcatagcaagatcctagctttacaaaaacaaacaataacaacaaacaaaatggtaattcataggcatgagttaaccacatatggggtggggatgccctagcctcacaatggccctatgagggctttggactctgaaagcgaagtcaggtgcggtgttgtgtgtacctgtggtcccagctgctcaggatgctgaggctgaggcaggaggccaagactgcagtgagccatgatcctagcactgcactccagcctgggctggagtaagaccttgtctcaaggaggggtggggcttgaaagcgggccctgggccccacctcctcacatccccagtccctgatagcaccatcatgtgggcgatgcctgtgtaaccccaagctgtatcataaagctggacaacaaagacagctccctggggtccactgtaatggaccaaggtctgtgcgtccttcctttccacatccccctaaagttgacaacagtagtacatggcacgatggatgttgtcttggcagggagcttataactcagcttaggccagatccaggagggcaggtcagtccttgaggatgggcagcagggaccgaggagggcccttggcgtcccccaaccttcgtttttctcaccccggggataaggctcagaggcggtgccagggaaaggcccactttgggcctactcacagcagcgatattgccactttccagaggtggtgaactgattccctagcaaccaggggccctgcctgagtaggtcacagcatgtcatcggctcctcaggaaagaggaagactgctcagctggagctcgggaccatgaaggcaggtgtgtgctgggctctcaggcactgtcctccccagcccacttcccagggctgaaccttagtgacagggaaaagcagggtgcaggacagcgatgcttcccaaagccacctgcagggttggtgctggaagttaccagatggcaccaggctggccgtgggctcacaatgacctctcttcctagctggaacttccagggtccctgttggaaaggaagtgtccagaggacacagcagctgagcaaggggcccacctctggttccctccatcttttactctgcatttctataccttcactctggagggctgggtgggaggacatggcttccttttagtcttctggtagaagcatggatgcaaacaccttccttgagtttccatgagcatagctgccacaggctgacctttccaaaagacattactaatataaaaggagaacaaaagaaagctaaagatagggcgtgcaaagaataaaaacagcctggctcacaaagaacaagttactggtttgtttccaaagctttcggaccctgccctgttattccccttccaggagataaccacctccaaggccagcagacgtctgcaggccctttcgccaggctctctggcctcctagtgctggcttgtccactgtctaggttgtcttgtaggacccatgccaccaggaatcctctccagactacttgacaaccctgcagtcagatctctgttctgccctcttctctacccagggctcttggctgtggtggcggagggagggatgcctgtttccctaggtctcccaggtgattggcacctatgtgactggaccttttaggagtgcagccttgttccatgtaggccttgtaatatgacctacctcttgccatgctgctcaggccagtttagcccacgaactgccatacaaaaggctttctccaacatttgatcttggcagaaactatagaagtctccccacctggttccatcctcccactgggccacaagaatagaaactgataagaagttggcctagttgatggaagtttgaacccggggacagaggttgcagtgaaccgagatcatgccatttntctctagcttgggtgaaagagcaaaacttcatctc

SEQ ID NO: 432 - DNA, 1585 bp, Homo sapiens
atacatactaccatggctgtctggtgggtaattctaccctctgccccaagtcccatgtcccactccagaccacaagcaggttccccagtctttctacccgattcaccaatggaagggatggtggaactgtgttctaacaatggtcaacaactcagattttcctaaacgttgcatatacatgcataactatttgttcatactgttccctctgcctagcatggaattccctcttctctctcagcagagaaacttaatactcccaattcaaaacgcagatggcaccacgcgaggtcagagaaagaggcaagaagttttagtcaacctgtctttgattattggcttgccatatgcagtctacgtgtacttgatcatcgcttaactttttagcctgtttctcatgtatgaaacgagaataatgatatccagctcatgggttgtttaaaggaatacatgacatgataaggtaagagcttattacatattatttttctttggtttcctttttcccttgcagtatcacttgctttcagcctatgtactggcaccactccagaataattttagagtcattaattttatttatttatttttctcttttatttcttttaactttattttttttaattttaaagacatggtcttgctttgttgcccaggcctggtctcaaactcctgggctcaggtgatccttctgcctcggcctcccaaaatgctggaattacaggcatgagccacagcacatggatccaagtcattaattttgttttatttaatgtaatttatttatttgagacagggtctcactctgttgcccaggctggagtgcagtggtacggtcttggctcactgcaacctccctccacctcccgggttcaagcaattcttctgcgtcagcctcccgagtagctgagattacaggcatgggccaccatgcccagctaattgttgtatttttagtagagatggggttttaccatgtcagtctggctggtcttgaactcctgacctcaagtgatccacctggctcagcttcccaaagtgctgggattacaggcatgagccaccacccctggccctaagtcattaattttaaaaaatgtttatttaggatgagcgtacttggtaggagccaggggtagaaaaagagcaagatatgattcacaagaaattattactttggccaggaacagcaagttagtgaataagaaaatgtctaatgaaaaaataattttcagaaattttaagaaaattttaagagattttaaagccattatatgcaagagactaaattttttagataaccagagagattaatgagaaatctacagtagctacgctgatctaaagttattggtatctagcttaataggtatgtcaatgggaagagaaaaaaagatatgacacatgagacattaagaaggaagaagcattataattttttaatagatactgtataaagaatagtacaggccagacatggtgctcacgcctgtaattccaacacttttcgaagcccaggcgaggggatcgcttggagtcgggagtttgagaccagcctgagcaaaaaaagcaagaccccatctat

SEQ ID NO: 433 - DNA, 1331 bp, Homo sapiens
agcataagcaacctgctaaaatgggttgccaaatgctacctatatcccaagagaaggaagtggaagtgatagtgtagctatataaataatgtgagaaaaaaatggaaaatagatctgaattcactgcagaatgtgggtcggggaaaaggtgaaattttaatggagtgaggaaaacatacatagataattgctataacatgaaatgtaattggacttgctttgcctatgaaatgagagtggctaaataaaaaagaattcagcctggttattagaagaaactaaaaacaaaatgaccgatttttaaagaataattggaagcctgacactccttcatacatacaagtaaaacagagattactcttaacatgtcaggaaaaaatttaattggaaaaagcattgatgcagtaatcattaaacaatgataactgggtttgtgggtctcaaaaggaaaactggcagaaatgcaaatagaaatagataaaaatactattgtatttcatatttacagcattccactaccagaatataaggccatattctgagaactgagatttcattgtgctcttacttgtttctccagtcccttgcataatagtgcatggtcaatacatggttgaattaatgaataaattatataaattagatttcagtaataaagtagaattgactggcatggagtgaaaattggtataacgaaaaatatttttgtgcatatatcaaagaaatgttcaacaaataacatttacttgggaactgcttaaaaatcgtgaatcaggtttcctgggacatctttgtacaggaagttttcctgagctaaatgaggggaaattggtatcaattctggtgctataaatatcaatttaagcatgtattaaccatgcaacttcctttggacattactgtttataaaaccatcctacaaacaggtactgaaggaaagacccaggatgctagtatcctaaaggctatattattgagtgttttctttaaaaaacttgatttccatttcccttacattagttaaccttgatttcatagtatcatcctgcacaaagtacaggttgcagaatactcaaactgtgcttatatagctgttttttaaaataacagttgtttgaaaatcttatttttttgatgctgcttcatccctcacacagcacttatttcccttggttgagcatgtggcatgtgacagtccatagcgccttcctttgcattactctgttatttcctgcctttgtatgttttatgtaaataatgcatttataaagtcttccactgataaacagaggcaattgatgcccttataaaataacagactagtaatagtg

SEQ ID NO: 434 - DNA, 2179 bp, Homo sapiens
ctcaaactcgggggccttgcttgccagggagagaaagagaattaaagttagtagctttcacttccaactctagcagacacagttggggatggggagggctttccatttccagcttggtaaaaggaaactaccaggggaatgggaagaggggatttggcgtatccgccacgccactccaaccacagtgggagctcatcttactccagcagcttaccactcgccaggcatgacgctaaatgctttcccagtgttatctcaccaccccctctgtccaccacgcaaggcagctgtggttactatcaagaaaagtaagacctgggaagtcggggacttcccaaggttacacagcctcgtggtggtggacctggggtctgtgtgaactcctaactgttgcactgtgcacgttccctgtcccctgcaggtcattaaggagtccaagcaggagcacaaggatgtgatgtgaggcaggacccacctggtggcctctgccccgtctcatgaggggcccgagcagaagcaggatagttgctccgcctctgctggcacatttccccagacctgagctccccaccaccccagctgctcccctccctcctctgtccctaggtcagcttgctgccctaggctccgtcagtatcaggcctgccagacggcacccacccagcacccagcaactccaactaacaagaaactcacccccaaggggcagtctggaggggcatggccagcagcttgcgttagaatgaggaggaaggagagaaggggaggagggcggggggcacctactacatcgccctccacatccctgattcctgttgttatggaaactgttgccagagatggaggttctctcggagtatctgggaactgtgcctttgagtttcctcaggctgctggaggaaaactgagactcagacaggaaagggaaggccccacagacaaggtagccctggccagaggcttgttttgtcttttggtttttatgaggtgggatatccctatgctgcctaggctgaccttgaactcctgggctcaagcagtctacccacctcagcctcctgtgtagctgggattatagattggagccaccatgcccagctcagagggttgttctcctagactgaccctgatcagtctaagatgggtggggacgtcctgccacctggggcagtcacctgcccagatcccaagaaggacctcctgagcgatgactcaagtgtctcagtccacctgagctgccatccagggatgccatctgtgggcacgctgtgggcaggtgggagcttgattctcagcacttgggggatctgttgtgtacgtggagagggatgaggtgctgggagggatagaggggggctgcctggcccccagctgtgggtacagagaggtcaagcccaggaggactgccccgtgcagactggaggggacgctggtagagatggaggaggaggcaattgggatggcgctaggcatacaagtaggggttgtgggtgaccagttgcacttggcctctggattgtgggaattaaggaagtgactcatcctcttgaagatgctgaaacaggagagaaaggggatgtatccatgggggcagggcatgactttgtcccatttctaaaggcctcttccttgctgtgtcataccaggccgccccagcctctgagcccctgggactgctgcttcttaaccccagtagccactgccacacgtctgaccctctccaccccatagtgaccggctgcttttccctaagccaagggcctcttgcggtcccttcttactcacacacaaaatgtacccagtattctaggtagtgccctattttacaattgtaaaactgaggcacgagcaaagtgaagacactggctcatattcctgcagcctggaggccgggtgctcagggctgacacgtccaccccagtgcacccactctgctttgactgagcagactggtgagcagactggtgggatctgtgcccagagatgggactgggagggcccacttcagggttctcctctcccctctaaggccgaagaagggtccttccctctccccaagacttggtgtcctttccctccactccttcctgccacctgctgctgctgctgctgctaatcttcagggcactgctgctgcctttagtcgctgaggaaaaataaagacaaatgctgcgccctt

SEQ ID NO: 435 - DNA, 3061 bp, Homo sapiens
gttctgtctcctctgtgggtgctttttctagccatctctgaagagtcaatcttgagaaatttctcagtatgtcttcatcatggcattatgtacatatcattagcataattcactcagatggaaggcagaaagggtgggaactaacattgatcacatttatggaaacctgccttctcgtgctgggcactttatatatgttatctccctttgtggtgcaatctcatgacatgcagtcattgtccatgtttgtgggtgaggaaacaggcttaggggtgggaggctcgcctgaggccccacactgttggctggagacagcgtggggcctgagtcttgctcacagcctgaacgctgcactctgctgctccgcgtcccaggaaggaaaagctgctgcagtgggtttgtgttgccaaatacatggaggcttttttctgggtgagtgcccaccagttgattgttctgtatgtccaagaaagtcaccttagaaaagaattaggttctaaatttagaaaataattgagttacaatatttagaactcagacagcatcccttgggcttggggtcacagcccccaaggggtgattaattttgccaattgaagatcagaggggcctgtggccagagtacccactgcttaagacacaggtgcgtctgccgatggccccctgaagttgctgcccgagagctacttcgacgtggtggtcattgacgagtgtgcccaggccctcgaggcgagctgctggatccccctgctgaaggccagaaagtgcatcctggcgggcgatcacaagcagctgccccccaccacagtctctcacaatcttcaatctgtagacacatccctggatggagggcactgggcagagactcagcaaaccatggttctgccgtgcggagacaccggagccctgatgcagtggcctggcccaggctgtcctggtggagacactggagccctgatgcggtggcctggcccaggctgtcctggtggagacactggagccctgatgcagtggcctggcccaggctgtcctggtggagacactggagccctgatgcagtggcctggcccaggctgtcctggtggagacactggagccctgatgcagtggcctggcccaggctgtctggtggagacactggagccctgatgcggtggcctggcccaggctgtcctggtggagacactggagcctgatgcagtggcctggcccaggctgtcttggtggagaaagtgctgccgcccccccagcccccctctcacctctccccatactacccagcactcactgcttcagccacacaggcctcgctggcccctctgcctggaccactcctgcctgggtgtggcgggcgtgccctctctccagatgaaccctctgcatggtatcccttgactgcccttacacgaggcctgtgaacagggcctggcacgtgggctgtccttggacaagtccctgttcagaaagttgtccctgaggaatgaaacacttctgagactcctgcatcctggccctcacttccaccgggggaagattgatttcttcagatttcggttgccttttgaaacacttctctgtttcactgtgggtgtgtagaagctatgaactcggaactttcgttgttttccgaggaccggaagaagatgtgcaagaaatccctgtcgagtagaatctcatcacaggggcgtgggcagcccaggagttggcggggctgcgctggcaggactgtcactcagcctgatggaacgcctggctgaggattactgcgcgagggtggtgcgacactgacggtgcagtaccgcatgcaccaggctatcatgcgctgggcctcagacaccatgtaccttgggaagctaacagcccactcttcggtggcaaggcacctcctgagggacctcccaggtgtggctgccacagaagagacgggtgtgcccctgctcttggtggacaccgccggctgcgggctgtttgagctggaggaggaggacgaacagtcgaaagggaaccctggcgaagtccgcctcgtcagtttgcacatccaggctctggtggacgctggtgttccagcccgtgacattgctgtggtctcgccatacaacctcctggtggacctgctcagacagagccttgtgtacaggcaccctgagcttgaaatcaagtctgtcgatggcttccaaggccgtgagaaggaggccgtgatactgtccttcgtcagatccaacaggataggtgaagttggttttcttgctgaggaccggaggatccaacgtgtctgtcaccccgtgcccgacgcccacgtggcggtcatcctgtgactcccgtactgtcaacaaccatgcatttttgaagaccctggtggagtatttcacacagcatggggaagtacgcacggcctttgagtatcttgacgatattgtcccagaaaactattcccatgagtctcccaaggttccagccacgttgccaccaagccccagggacctggtgtgtccaccaggaccggaagccagcggcaggagggaggccaggaggctgcagcacctgccagacagggccggaagaagccggctgggaagtctctggcctctgaagctccatctcagcccagcctcaacggaggcagcccagagggagtggagagccaagatggcgtggaccacttccgggccatgatagtggagttcatggccagcaagaagatgcagttggagtttcctccttccctcaattcccacgacaggctgcgggtccaccaaatagccgaggagcacgggctgaggcacgacagttctggggaagggaagaggaggttcatcactgtgagcaagagggccccgcgaccccgagcagccctgggacccccagcagggaccggtggcccagcccctctccagccagtgccccctacccctgcgcagacagagcagcctcccagggagcagcgtggcccagaccagcctgatctgaggacgctgcacctggagagactgcagagggtcaggagcgcgcaggggcagcccgccagcaaggagcagcaggcttcagggcagcagaaacttcc

SEQ ID NO: 436 - DNA, 2361 bp, Homo sapiens
ggcactggtgtggttacaagtgttccttccgactcccctgatgatattgctgccctcagagacttgaagaaaaagcaagccttacgagcaaaatatggaattagagatgacatggtcttgccatttgagccggtgccagtcattgaaatcccaggttttggaaatctttctgctgtaaccatttgtgatgagttgaaaattcagagccagaatgaccgggaaaaacttgcagaagcaaaggagaagatatatctaaaaggattttatgagggtatcatgttggtggatggatttaaaggacagaaggttcaagatgtaaagaagactattcagaaaaagatgattgacgctggagatgcacttatttacatggaaccagagaaacaagtgatgtccaggtcgtcagatgaatgtgttgtggctctgtgtgaccagtggtacttggattatggagaagagaattggaagaaacagacatctcagtgcttgaagaacctggaaacattctgtgaggagaccaggaggaattttgaagccaccttaggttggctacaagaacatgcttgctcaagaacttatggtctaggcactcacctgccttgggatgagcagtggctgattgaatcactttctgactccactatttacatggcattttacacagttgcacacctattgcaggggggtaacttgcatggacaggcagagtctccgctgggcattagtgacaaatggcctacagctgtgagagcaaatggacatctcctcctgaactctgagaagatgtcaaaatccacaggcaacttcctcactttgacccaagctattgacaaattttcagcagatggaatgcgtttggctctggctgatgctggtgacactgtagaagatgccaactttgtggaagccatggcagatgcaggtattctccgtctgtacacctgggtagagtgggtgaaagaaatggttgccaactgggacagcctaagaagtggtcctgccagcactttcaatgatagagtttttgccagtgaattgaatgcaggaattataaaaacagatcaaaactatgaaaagatgatgtttaaagaagctttgaaaacagggttttttgagtttcaggccgcaaaagataagtaccgtgaattggctgtggaagggatgcacagagaacttgtgttccggtttattgaagttcagacacttctcctcgctccattctgtccacatttgtgtgagcacatctggacactcctgggaaagcctgactcaattatgaatgcttcatggcctgtggcaggtcctgttaatgaagttttaatacactcctcacagtatcttatggaagtaacacatgaccttagactacgactcaagaactatatgatgccagctaaagggaagaagactgacaaacaacccctgcagaagccctcacattgcaccatctatgtggcaaagaactatccaccttggcaacataccaccctgtctgttctacgtaaacactttgaggccaataacggaaaactgcctgacaacaaagtcattgctagtgaactaggcagtatgccagaactgaagaaatacatgaagaaagtcatgccatttgttgccatgattaaggaaaatctggagaagatggggcctcgtattctggatttgcaattagaatttgatgaaaaggctgtgcttatggagaatatagtctatctgactaattcgcttgagctagaacacatagaagtcaagtttgcctccgaagcagaagataaaatcaggtaagcctgctgtcctgggaaaccacttaatgtttttagaatagaacctggtgtgtccgtttctctggtgaatccccagccatccaatggccacttctcaaccaaaattgaaatcaggcaaggagataactgtgattccataatcaggcgtttaatgaaaatgaatcgaggaattaaagacctttccaaagtgaaactgatgagatttgatgatccactgttggggcctcgacgagttcctgtcctgggaaaggagtacaccgagaagacccccatttctgagcatgctgttttcaatgtggacctcatgagcaagaaaattcatctgactgagaatgggataagggtggatattggcgatacaataatctatctggttcattaaactcatgcacattggagatttatcctggtttcttaggaatactactactctgattgtgtctactgattggctatcagaaccttaggctggacctaaatagattgatttcatttctaaccatccaattctgcatgtattcataattctatcaagtcatctttgattcctggacctaataaattttttttccctttc

SEQ ID NO: 437 - DNA, 2388 bp, Homo sapiens
caaattgccattttattaaatacaaaaaaaaaaaaagtacagcttggatcaagagatcaaacatttacaaatctcaatccaaagccattatttttcagggaaaattaaatcatttctagcagagtatttgactcctaagggaaaataagtcaaatatcttctttaagagtaagggcattcttccattgtaggtatttctaattgactttataataatttgaacaaatcttgaacaagatttaaagaatttataatctcccaaacttaaaattgtattctttctggttttttatttttatgtattaagattatattcaaaccacttaattatcttcatgacataagtttgtgttaatagaaaattatacagaaaaaaacatgatttgttcctctgtggaaagatatgcttcaatgagttaaatacccttgaattttggttctcatttcttatttggacttttctgttatgtacctcaggggtcttaaattctaacagatgaagtagtcaaaggggtataaaatacttgaaaaaaattaaaacttcaaaagggacgaatttctctgttaacttttgtttatcctatactgacttattttgaaattgtgaaaaaacaggcagctaccatataaattggtatctatgaaaatactgattactttcttcctgtgattttcactgttaagaaaactttgtcttgaaatgatggacaatcttaatacttgttcagataaagaaatgtgactttcaatacctttaccatttgtatttctttagggaaatattttaataatgattgtaaaaataaaagaaatatggttgagaaaaatagaagaaattaagatgaaatttgaacagttgtaatccacagtcccatttttccctctattttattgccttctactaagttattgaaggcccagatctgcaaaatttacaagctactaattcattgtctcctttaagaatttggagcaaaaattattccgactatgcggaaatgaattcacatcatcatggcaggttttgactatgagggaattcaggttaggttcaaatagaataatggtccatggagaaaaatactttctgatttttcttcaagttggatggaaaggtttttctttatttaaaaaaaaaaaaaaaagtcctcctgagaattttgccttcgaaaaagaagttttataacagctgcctgtagctacattataacttcggtaattaagtgacaaaactgtctcattatgcttttaaaatactgattaagtgcattccagaaataatacatatcattcatttcaaaatcaacctacctgaattctgactcttcaatcatgagtagccattttacaaaaccaaagggtctcatttcccaaacagtactttaaatatcatcctaatagtaatatcctaatagtaataatcctattaatactcacttcaatgcataaaataaacagccaatgcacttccatcaagtctgcaggcactatataataataaataggtttccaaaatcacttaataaaaacacacagttataatgtgctcggccttcattagcatcctctgcatggggtggttttcatttaacctgaattattttaacattttggctaatttgtttgctgcaatttcatgggtctaaatttttggtttggtttgcaatgtaaatcatattgtatatctgctcctttgttattagatttactttgtgaataatatcttttaaaaattgagttatcaaaaacttaaattataatgtcatcaactaataccaggtaaatatactaatatatatgtagggcatgattaaattgcatatattttgaaatgtcaaactattttttgtttttttaaaaaaatgaatgcatctcttaaacctgtaccattaattttaaaaaagtttcatttggtatttcatattatattttaaaatatttttctttatctagtagtacaggtttaaagaaactttttctgattgaaatgataaaatatgcctcatttcactagaattttaagaataatacatgtaaaagtataactcatataagattataaatatccacaatatcttctttgattttcatgtaacaccactttttactcattcttttatttgttattattcgaaatcattcacaatgtaaatagcatgtttcatgatgtaaaatgtctttgcatttacagactgcagaacaaggtgaatttgtatatgaaaaataagtgatggaaacgtgggattcttataaaacaaagtggaaatgatagttctgtgttatatttacataattcattacaaaattgtctagttaagtcatgcatttatttaccttaaaagtgtccaaactgtcacttataaaatatttaaatcaataaataatacc

SEQ ID NO: 438 - DNA, 3415 bp, Homo sapiens
tttctcccgacgtgcacatcgatctcgtatgtgtggcatctgatattaaacgggaggttttaagaagcgtctgccgtgatcatggagcttcggaagcgggaatggttcttccgggtttgctgttttgtctgtttcccccttgtgtggtttccgcctgcgacagttccagaatttgctctcccactcagtgtgctctgcagctgtgaggaaacagccttcgttagaggcgggagcagagacgagccgctgctctgtgtcgtgtttgctgtggccgcagggagaggagcgggacacgcacctttccaggggcctctgtgtcccgcactgtgtgtgagtggaccgcagcgcgcagccacatgccctggctgccatgggccagaccgcctccacctcccccgcccgcctggcctgtcctgagtgcatttccctgcactgtgtcgtcactgcacagccagtcaccgcggtctcagtcatcggcgcggatggctatgctggggtcccagggtggccgcagcagtcagggtcactgtgggagccctggggtggagtgacaaaccgcattgtcctgtgcccgccatggcagaagcgcagcctttgtatggaggcccaaccgcgctcccgtctggagaagcggcttccggggtgtggctgccgggtcggctctggtccacagcacggtgccggggctgcaggttgttgagggctgtgactccgtggggctcagccaggctccagcagggtcagacgtgctgttaagagcaaagccacagacgatgacttgtccattctcagtggatgctccaggctgtgcctacacagcagtgctggtgacatgtccagggttccagggcccggtggcctgggagctgctttctccccactggctgggctgcatctggccctggctggaggccttgctttgaggggctgtgaccctcttcccccaggccctccccagccgacgacagccaccggagaggagatcggaacacgattgtctcagatgcagggcgctgtgcgggacgaagccgcaaggactctcgtatcgggcccttgggactcgggaggtgccagaggcggcggctgctctggacctcggtgttcactgacctttgtttcacttgcctctgctcgactccgagagcaggaaacccggccgtggcctggcagctccgcctcccatgcccgcacgctggggtctgtcttgtctggagcagtggggcacaccccggaggaggcgggggtcagggctgtcggccttggccccctgctggtcgctgtttcggggactcggggcggccagtaccaccgcctgaggcggggctcagcagcgttgcatgtacgggcctcgtactgcctcatggaaaatcctccggagccgccctccattgtgggttcctgagagtaggacacattgccatggttttgtgggaatcacgcgcccctgatggaacttttctgctgttgtgaagtacttttatccatttgcttctctgctgaccttgccaagttgttcgaggtggaattaaacacctcccagacaaaaaaaaaaaaaaaaaaaaaaaaaaaaaaaaaaaaaaaaaaaaaaaaaaaaaaaaaaaaaaaaaaaaaaaaaaaaaaaaaaaaaaaaaaaaaaaaaaaaaaaaaaaaaaaaaaaaaaaaaaaaaaaaaaaaaaaaaaaaaaaaaaggccgccagaacacaggtgtcgtgaaaactacccctaaaagccaaaatgggaaaggaaaagactcatatcaacattgtcgtcattggacacgtagattcgggcaagtccaccactactggccatctgatctataaatgcggtggcatcgacaaaagaaccattgaaaaatttgagaaggaggctgctgagatgggaaagggctccttcaagtatgcctgggtcttggataaactgaaagctgagcgtgaacgtggtatcaccattgatatctccttgtggaaatttgagaccagcaagtactatgtgactatcattgatgccccaggacacagagactttatcaaaaacatgattacagggacatctcaggctgactgtgctgtcctgattgttgctgctggtgttggtgaatttgaagctggtatctccaagaatgggcagacccgagagcatgcccttctggcttacacactgggtgtgaaacaactaattgtcggtgttaacaaaatggattccactgagccaccctacagccagaagagatatgaggaaattgttaaggaagtcagcacttacattaagaaaattggctacaaccccgacacagtagcatttgtgccaatttctggttggaatggtgacaacatgctggagccaagtgctaacatgccttggttcaagggatggaaagtcacccgtaaggatggcaatgccagtggaaccacgctgcttgaggctctggactgcatcctaccaccaactcgtccaactgacaagcccttgcgcctgcctctccaggatgtctacaaaattggtggtattggtactgttcctgttggccgagtggagactggtgttctcaaacccggtatggtggtcacctttgctccagtcaacgttacaacggaagtaaaatctgtcgaaatgcaccatgaagctttgagtgaagctcttcctggggacaatgtgggcttcaatgtcaagaatgtgtctgtcaaggatgttcgtcgtggcaacgttgctggtgacagcaaaaatgacccaccaatggaagcagctggcttcactgctcaggtgattatcctgaaccatccaggccaaataagcgccggctatgcccctgtattggattgccacacggctcacattgcatgcaagtttgctgagctgaaggaaaagattgatcgccgttctggtaaaaagctggaagatggccctaaattcttgaagtctggtgatgctgccattgttgatatggttcctggcaagcccatgtgtgttgagagcttctcagactatccacctttgggtcgctttgctgttcgtgatatgagacagacagttgcggtgggtgtcatcaaagcagtggacaagaaggctgctggagctggcaaggtcaccaagtctgcccagaaagctcagaaggctaaatgaatattatccctaatacctgccaccccactcttaatcagtggtggaagaacggtctcagaactgtttgtttcaattggccatttaagtttagtagtaaaagactggttaatgataacaatgcatcgtaaaaccttcagaaggaaaggagaatgttttgtggaccactttggttttcttttttgcgtgtggcagttttaagttattagtttttaaaatcagtactttttaatggaaacaacttgaccaaaaatttgtcacagaattttgagacccattaaaaaagttaaatgag

SEQ ID NO: 439 - DNA, 2932 bp, Homo sapiens
  misc_feature 1850: n = a,t,g, or c
agcggttctcctgcttcagcctcctgagtagctgggactacaggtgcacgccaccacgcctggctaatttttgtatttttggtagagatggggtttcaccatgttgtccaggatggtctccatctctggacctcctgatccgcctgcctcagcctcccaaattgctgggattacaggcgtgagacactgcacctggccacatcgtacattttgttggagaacatcctcgagtaacttcttaagaaaggtaaattttagggtctttacatatctgaatatgtagtcattgttttaccttcatattccaatgatagtttgactttagaattctatgttagaaacaatttttcctctgaattttgaagatactgctttagcctgtagtgtcactgattaaaagtcacatgctaatattattctcattcctttgctggcaacctgttttctctacatctggaagcttaatttttttttcttcatacttagtgttttgaaatgtcacaatcatgtgcccagcagtggggttttccctcgtctactttgctgggcacctggtgggtgggccctttcaatctgaagacttgtgtccccctgctctgagaagttgctgttttatttctttgcttactttctccgttctttctagaactcctgttagttggatattggatttcctggatgattatcttctcacatatgtattttccatgtcttttgtttttttaattctatattatgggaccttgttttgactttatcttctactggacacctttattttggcagtcatttttcatttctcagcattcttattctccaaagatgccttttcattgcatccttttcttcttttttttatgaatgaagtatcgtctgtgtatgtgtacttaatagaactttactggcgtcttacagataacagaagataattatcaggccagacaggaaacatttccaaggataccagatagaacctctctgggagaaggtcacttatgcctttctgagggaggctgcctactggctgtccctctccataacctcccagtttcataccatgtgtgggcaagattgtcttccaccaccctatggttctcgccatgtgctccctgcctgcaatccagatctccagctctcaccatggcatcaaagagaggaggccattttcacattcttcactcccaggccaactgcatttcctgctcccatgtaacactccccatatcaattttctttctgggattctaacacacctgccgcacagtggtgatctgggctccgtagcccataagagaccatcacagtactcagcagcacatgtcacagagtaggttgttttaaagttaaataaccatgtatgtagtagggccaacaatccagcctcattcctttttacagtgcttcctccaacaggagtccatagcatttcaaacctgcatgtctcctgatgtggtcccaatggggtatcttctgtgagcaaaggcctgagaaaaaatatgcacacatacctctcaaaaacaaacaattttcactttggcattttagtcccaacatgaattgggactaaacatgaatctagtcccaattcatgtttaggataaaaaattaactcagtggaagcatagtactgtaaagacacccagattatatcagtacacagaacatttaacattttaatcatagtggatatttgctgagtgcttactctgtggcaggcacttgagttacttttcatttcataaacaaggaaaatgaagctcccgggtgtcatttgcccagggtcacagagctaataaatggcagacaggaaattgcaccaggactgtctaaccacagtcaacccatgttanctgctgtacagagctgtcctggtttccaccagccacattcaggttaatagtgatagcacaattttctctaagatcagtaggtggatacctgagatacctcagtctaagtaaagagcgtattctggtaagtttgcttccaagatgaattgctatcctttgctctggagatagaaaactattaccagcttttatttttaagatttcttttttcatagaaaccataacactttattttttaatttaaatttaattttatttatttatttttgagacagagtcttgctctgttgctcaggctagagtgcagtggcgcaatcttggctcactgcaacctcggcctcctgggttcaagcaattctcctgcctcagtctttggagtagctgggattacagatgtgtgtcaccatgcctggctaagttttgtatttttaatagagacagggtttcaccatgttggccaggctggtctcgaactcctgacctcaggtgatccgctcgctttggcctcccaaagtgctgggattacaggtgtgagcgaccacacatggcctaatttttattttttatcaaaggaatatatatacatacttaaaaaaataaaacagtgctaagagatgcctaataaaatccaacaatatcctgtcctactccttcccactgcaagtcctgctccctagaggcaactacttccaaatcccttgttccttgccacctcccactcagaggctgaagaaccagatactttcttagcctcccttgcagctaaggatgactacgtgacctggctttggccagtgagatgtttgctgcgggccttctgaaaaagtatttgcttttctgagcagaggcacaaatagctgatgttgtccccttctttctttctgctttgaatatagtcaagccgtctggagctgtgacagccatcttgtgaccatgtggggatgagcacgaggaagaagacaacatgtgaaggaagaaagtcagaaagagcccaatttcttgatggcatcattgagcagctgaacccatgccacagttcctgttaacttaaaaaaataaataaagccatatgtgtttaagac

SEQ ID NO: 440 - DNA, 1411 bp, Homo sapiens
  misc_feature 1411: n = a,t,g, or c
cgctgcttcgttgcctggactctggtttccgccctggagcaagccggggcctggtcggcagctgggccgccatggagtccacgctgggcgcgggcatcgtgatagccgaggcgctacagaaccagctagcctggctggagaacgtgtggctctggatcacctttctgggcgatcccaagatcctctttctgttctacttccccgcggcctactacgcctcccgccgtgtgggcatcgcggtgctctggatcagcctcatcaccgagtggctcaacctcatcttcaagtggtttctttttggagacaggcccttttggtgggtccatgagtctggttactacagccaggctccagcccaggttcaccagttcccctcttcttgtgagactggtccaggcagcccttctggacactgcatgatcacaggagcagccctctggcccataatgacggccctgtcttcgcaggtggccactcgggcccgcagccgctgggtaagggtgatgcctagcctggcttattgcaccttccttttggcggttggcttgtcgcgaatcttcatcttagcacattttcctcaccaggtgctggctggcctaataactggcgctgtcctgggctggctgatgactccccgagtgcctatggagcgggagctaagcttctatgggttgactgcactggccctcatgctaggcaccagcctcatctattggaccctctttacactgggcctggatctttcttggtccatcagcctagccttcaagtggtgtgagcggcctgagtggatacacgtggatagccggccctttgcctccctgagccgtgactcaggggctgccctgggcctgggcattgccttgcactctccctgctatgcccaggtgcgtcgggcacagctgggaaatggccagaagatagcctgccttgtgctggccatggggctgctgggccccctggactggctgggccacccccctcagatcagcctcttctacattttcaatttcctcaagtacaccctctggccatgcctagtcctggccctcgtgccctgggcagtgcacatgttcagtgcccaggaagcaccgcccatccactcttcctgacttcttgtgtgcctccctttcctttccctcccacaaagccaacactctgtgaccaccacactccaggaggcagccccatccccttccagcccctaagtaggccctcccctccctaaatctgcttccgcaccacctggtcttagccccaaacatgggccttctctctcccagataagttggtcctccctctgcctttcctctcaagcccccaaagagcaaaggcaacagcaagaccagcgggttcttgcaacactgtgaggggcagccagggcggccccaataaagcccttgaatacttn

SEQ ID NO: 441 - DNA, 1501 bp, Homo sapiens
agtttatctcttctttactgaattaattagttttggaaattcttttaccattaaaaaaaattaaggaccatacagagaatgatttaagaaaaaacaagtcacttaaaaatcatcacctatttataaactgtattaattacacataatgcttattgattcaatgaggtttctctaaagacttctgcttaataaatatgctgacttcatttaaattagtttagactattgtaggaatggaaggaaatgattatatttactagaattagtgagatcagaaagcatatcagaatgttgatgatatcaaggagacaatctacagagtttttgcctctgtggatggaaataagggtgtttttttttggtttttttttactttagtttcccataatttttggaaattatgtgtgcatttagttcttttagtaacactgattttaaaattaaatttcaaaagtcaatctctaagagtaatttatttttgttttaccaaccagtgccaaaaaggagaggagggaatccaaaagccaatcttttgaaccaatgtgtaaaagattatgttttttcttaaagttagggaggctcgggccctgacactgccagccccagtgagcatccctggctacctcgggattatgtgcaagctgctttgtcctacatttctttcatctggttcttattgggagtgcttctctctaataaaaattgatttcccacaaaataggcaaagctgaacaaagatgaatgcttttgataagttgggtttcacttcagttgaaacaatgtgatagaatatccaggtgtggcatgatggggcaggaggaggtgcctagagggaaaagttatttttgtttcttagtgttgtgttgtggggatgggacagataagaataagatgtttattgccctaatcatgctaagagactattattcaatatgcttttcccgcttttctaagaggaataaacttagacaaattacattataaacagttcccctactactatctcccactctagataaagccagtgggtggtatgggtccttttattccttatagtattatgccaaagaatcaacttattttcattgaagattataaataaatgaagcttgttatagccataatgatttgagtcagtataccattttacctataaaatgcaaaattcatccttgcaaccccattcaccaggagccttgaagcattttgtttactccaaaggccttgtcaaggaagcataattttttgttttgccttcttatttagtcagtttggtcatatttacttaaaaaaacaaactgaaaatcacactcctttatatgttgatataactgattttatagaatctgtctgttctttgtttaacaggtctctgtaagcaagcttgcaagtgtattttgtgtacattttatctgaggtggaaatgaaaattctaaagagaaaatattttaaaagatattgtatttatgttgcttgtgttgtagaataaagattcaaatgc

SEQ ID NO: 442 - DNA, 1556 bp, Homo sapiens
gtgtgccggcgcctctggcagggattggggaatttttctgtaaacacttctaagggcaatacagccaaaaatggtggcttgcttctgtaacaatctctgatgaaccagacatattatataagcgcctctcggttttggtgaaaggtcacgataaggctgtattggacagttatgaatattttgctgtgcttgctgctaaagaacttggtatctctattaaagtacatgaacctccaaggaaaatagagcgatttactcttctccaatcagtgcatatttacaagaagcacagagttcagtatgaaatgagaacactttacagatgtttagagttagaacatctaactggaagcacagcagatgtctacttggaatatattcagcgaaacttacctgaaggggttgccatggaagtaacaaagacacaattagaacagttaccagaacacatcaaggagccaatctgggaaacactatcagaagaaaaagaagaaagcaagtcataaagcctcagggaggccatttttgcctaaatttgaaatgagggtgggccagatgagtatgtttaagtggagagtgcttccagctgagatgatttgagtctgtcctaactgctccattgagttctcgtgccctcatcagctgagggcagggaatggaactttaatggaagaaccacttttatctattctttttattcattgtttcagttctgatttcagcaaacatgagcaaaccactttgactgaaagcagaaagagtgaaaattctattttgttacgctactggtgttcaattattagtttgtaccatttttaatttatgtcagttgatgcatctgaaaataagtgcttggagtgttcgtacccttatttttttttaagattcctagaaggaatctttggttaattcagattgagcagttaaagtttttgctatttacctttgtgcaggctggcatatgctaatttgggggtggtaaccaaccgattttatctcatgtaagcattacattttgaagactgaatatacttcacagcagatcaaacacatttatggcatgcactgacctcttcttggagcccagaactttatagagttgcctaccagggttactgtaatggaatttatgatcttaagaaattactagttgtattatttatcctatgattcattcattcaataagcttttactgcataaactttacatccagcactgtagttaagtacccaaaattgaatagaaataatggcttttgaaaattgcacaaagcaggccaggcacggtggctcacgcctgtggtcccagcactttgggaggccgaggcaggcggatcgcgaggtcaagagatccagaccatcctggctaacacggtgaaaccccgtctctgataggaatacaaaaattagctggacatggtggcacgtgcctgtagtcccagctactcaggaggctgaggcaggagaatcgcgtgagcccgggcccggtggaggctgcagtgagacgagatcgcgccactgcactccagcctggcgacagagcgagacaccgtctc

SEQ ID NO: 443 - DNA, 1853 bp, Homo sapiens
aggacaaagctccagaccagtgaacgagcaaataaactggctgctccctctgtttcccatgtcagtcctaggaaaaacccttctgtggttataaagccagaagcatgttctccacaatttggaaaaacatcttttcctacaaaggagtcttttagtgctaacatgtcccttccccacccctgccagacggagtcaggatacaagcctctggtgggcagagaggatagtaagccccacagtctgagaggtgactccataaaacaagaagaggcccagaaaagctttgttgacagctggagacagagatcaaacactcaaggttccattttgataaacctgctcctgaagcagcctttgatcccagggtcatccctaagcctttgccacctcctgagtagtagttctgagtctcctgctggcacccccctgcagccaccagggtttggcagtaccttggctggaatgtcaggcctcaggaccacaggttcttatgatgggtcattttccctctcagccctgagagaagcacagaacctggcattcactggactgaatctggttgcccggaatgagtgctcacgtgatggagacccagcagagggaggcagaagggccttcccactctgccagcttcctggagccgtgcatttcctcccccttgtacagttcttcatcggcttacactgccaggccctgcaggacttggcagctgctaagagaagcggagcacctggggactcaccgacacattcctcctgcgtgagctctggggtagagaccaaccctgaggactcagtgtgcatcctggaaggcttctctgtgactgcacttagcattcttcagcacctggtgtgccacagtggagcagtcgtctccctattactgtcaggagtgggggcagattctgctgctggggaaggaaacaggagcctggttcacaggcttagtgatggagatatgacctcagccctaaggggggttgctgatgaccaaggacagcacccactgttgaagatgcttcttcacctgttggctttctcttctgcagcaacaggtcaccttcaagccagtgtcctgacccagtgccttaaggttttggtgaaattagccgaaaacacttcctgtgatttcttgcccaggttccagtgtgtgttccaagtgctgccaaagtgcctcagcccagagacacccctgcctagcgtgctgctggctgttgagctcctctccctgctggcggaccacgaccagctggcacctcagctctgttcccactcagaaggctgcctcctgctgctgctgtacatgtacatcacatcacggcctgacagagtggccttggagacacaatggctccagctggaacaagaggtggtgtggctcctggctaagcttggtgtgcagagccccttgcccccagtcactggctccaactgccagtgtaatgtggaggtggtcagagcgctcacggtgatgttgcacagacagtggctgacagtgcggagggcagggggacccccaaggaccgaccagcagaggcggacagtgcgctgtctgcgggacacggtgctgctgctgcacggcctatcgcagaaggacaagctcttcatgatgcactgcgtggaggtcctgcatcagtttgaccaggtgatgccgggggtcagcatgctcatccgagggcttcctgatgtgacggactgtgaagaggcagccctggatgacctctgtgccgcggaaaccgatgtggaagaccccgaggtggagtgtggctgaggccctgagtgtccagccacatggtggcaccagcaccactcctttccttaccacatcaactgattaaagcagtgaccagcagg

SEQ ID NO: 444 - DNA, 1963 bp, Homo sapiens
  misc_feature 905: n = a,t,g, or c
tgcagtgctcgagccccgtgcaggggagcttgcgggaggatcgaccgacagacggacgcacgccgaggcactgcgcccccagccccgcgccggtgccaccgcagcccgaccccggccgccagtccagccgcccctcgcccggtgcctaggtgcccggccccacaccgccagctgctcggcgcccgggtccgccatgcgctccgccgctgtcctggctcttctgctctgcgccgggcaagtcactgcgctccctgtgaacagccctatgaataaaggggataccgaggtgatgaaatgcatcgttgaggtcatctccgacacactttccaagcccagccccatgcctgtcagccaggaatgttttgagacactccgaggagatgaacggatcctttccattctgagacatcagaatttactgaaggagctccaagacctcgctctccaaggcgccaaggagagggcacatcagcagaagaaacacagcggttttgaagatgaactctcagaggttcttgagaaccagagcagccaggccgagctgaaagaggcggtggaagagccatcatccaaggatgttatggagaaaagagaggattccaaggaggcagagaaaagtggtgaagccacagacggagccaggccccaggccctcccggagcccatgcaggagtccaaggctgaggggaacaatcaggcccctggggaggaagaggaggaggaggaggaggccaccaacacccaccctccagccagcctccccagccagaaatacccaggcccacaggccgagggggacagtgagggcctctctcagggtctggtggacagagagaagggcctgagtgcagagccagggtggcaggcaaagagagaagaggaggaggaggaggaggaggaggctnaggctggagaggaggctgtccccgaggaagaaggccccactgtagtgctgaacccccacccgagccttggctacaaggagatccggaaaggcgagagtcggtcggaggctctggctgtggatggagctggaagcctggggctgaggaggctcaggaccccgaagggaagggagaacaggagcactcccagcagaaagaggaggaggaggagatggcagtggtcccgcaaggcctcttccggggtgggaagagcggagagctggagcaggaggaggagcggctctccaaggagtgggaggactccaaacgctggagcaagatggaccagctggccaaggagctgacggctgagaagcggctggaggggcaggaggaggaggaggacaaccgggacagttccatgaagctctccttccgggcccgggcctacggcttcaggggccctgggccgcagctgcgacgaggctggaggccatcctcccgggaggacagccttgaggcgggcctgcccctccaggtccgaggctaccccgaggagaagaaagaggaggagggcagcgcaaaccgcagaccagaggaccaggagctggagagcctgtcggccattgaagcagagctggagaaagtggcccaccagctgcaggcactacggcggggctgagacaccggctggcagggctggccccagggcaccctgtggccctggctctgctgtcccccttggcaggtcctggccagatggcccggatgctgcttccggtagggaggcagcctccagcctgcccaagcccaggccaccctatcgccccctacgcgccttgtctcctactcctgactcctacctgccctggaacatcctttgcagggcagccccacaactttaaacattgacgattccttctctgaacacaggcagctttctagaagtttcccttcctccatcctatccactgggcacaactgcaataacttctgaccttttggtgaaagctgagaactcctgactgtaacatattctgtatgaactttatctaaagaaaaataaatctgttctgggc

SEQ ID NO: 445 - DNA, 2181 bp, Homo sapiens
ttcatgataaaattgagcctatgttggagacactggagaatctttcctctcgcctgcgtatgccaccactgatccctgctgaagtagacaagatcagagagtgcatcagtgacaataagagtgccaccgtggagctagaaaaactgcagccatcctttgaggccttgaagcgccgtggagaggagcttattggacgatctcagggagcagacaaggatctggctgcaaaagaaatccaggataaattggatcaaatggtattcttctgggaggacatcaaagctcgggctgaagaacgagaaatcaaatttcttgatgtccttgaattagcagagaagttctggtatgacatggcagctctcctgaccaccatcaaagacacccaggatattgtccatgacttggaaagcccaggcattgatccttccatcatcaaacaacaggttgaagctgctgagactattaaggaagagacagatggtctgcatgaagagctggagtttattcggatccttggagcagatttgatttttgcctgtggagaaactgagaagcctgaaatgaataatgcttgggagaacttaaacggaaacatggaaagataggctagcaaaaacttgaggatgctatgcaggctgctgtgcagtatcacgacgctcttcaggctatgtttgactggcaagataacactgtgattaaactcttcaccaagccccctgttggctctgacctcgatactgttaaagatcagttaaatgaaatgaaggagttcaaagtagaagtgtaccagcagcgaattgagatggagaagcttaatcaccagggtgaagtgatgttaaagaaagctactgatgagacggacagagacattatacgagaaccactgacagaactcaaacacctctgggagaacctgggtgagaaaattgcccaccgacagcacaaactagaaggggctctgttggcccttggtcagttccagcatgccttagaggaactaatgagttggctgactcataccgaagagttgttagatgctcagagaccaataagtggagacccaaaagtcattgaagttgagctcgcaaagcaccatgtcctaaaaaatgatgttttggctcatcaagccacagtggaaacagtcaacaaagctggcaatgagcttcttgaatccagtgctggagatgatgccagcagcttaaggagccgtttggaaaccatgaaccaatgctgggagtcagtgttacagaaaacagaggagagggagcagcagcttcagtcaactctgcagcaggcccagggcttccacagtgaaattgaagattcctcttggaacttactagaatggagagccagctttctgcatctaagcccacaggaggacttcctgaaactgctagggaacagcttgatacacatatggtaatagcaattttttgaaattgagcataagcatcccatattcactagctcctttccaagttcacagtcataattaatatgtatctggaaatctacaaagtagtgcatttttatcaaacatatagtataacctttggggattgctgcctgttacaggcttctaataccttacagtaggcagcagtagtgacagggaaggtcagctggaaattttgagttaatcagctttactggcacacatatattgacttgaagatgacagcatcaagaagacaaatatacaacacagatgtgctttcacttaagaaggaaactacttaaggggggtttagggaaatcaaatagttacccgacagtattcaagaatgcatgctagaacaaaaagcaacataatttctaggcaaattttttcatgaaaaggggaaatagattattggagtcttttgagggatctctaatccttaaaaaatgttttcttggccgagcgcagtggctcacgcctgtaatcccagcactttgggaggcgaggtgggtggatcatgaggtcaggagatcaagaccatcctggctaacatggtgaaacctcgtctctactaaaaatacaaaaaattagccgggcgtggtggcgggcgcctgtagtcccagctactcaggaggctgaggcaggagaatggtgtgaacccgggaggcggagcttgcagtaagccgagatcactgccactgcactccagcctgggtgacagagtgagactccatctc

SEQ ID NO: 446 - DNA, 609 bp, Homo sapiens
gcagattctgaggtatatctgctgccttggaagacataagaagcagtgatactccctggctcggttattttctccatacaatgcacacatggtacaatgatagaaggcaaaattgccactgtcttcttttttttctcatatatctaaggaagatatatcaggttgtgcctcatgtaccgcttctagtgaaatgtagaggaaggctcaaaggagtcaacatttagatctggaagggacaagtcatgccttgggcctagaataccctgatgagaaaagagaagaggaagggaggccatatctacaacacagcctctcggcactgctgctccttattttaactttgtcttgcattgtcctgtatttatcacagtttctgttgaacagcttttcaagtatttgggtagtttatcttgccatcctccccttctggttctctgcacccacctgtcccactgcagttccttccgtgctctgtgactttaagagaagaaggggggaggggtcccggattttatgtttgtttgttttttctccttagcagtaggacttgatattttcaattttggaagaactaaaagatgaataaactgggttttttgtgttgtttgg

SEQ ID NO: 447 - DNA, 992 bp, Homo sapiens
tagtaattgaaggcggaagtctggaggacgctgaggggcggaggcgggagaggcgagctcgcgatgagtggtctcggcaggctcttcgggaaggggaagaaggagaaagggccaacccctgaagaagcaatacagaaactgaaggagacagagaagatactgatcaagaaacaggaatttttggagcagaagattcaacaggagctacaaacagccaagaagtatgggaccaagaataagagagctgccctacaggctttgcggaggaagaaaagattcgaacagcagctggcacaaactgacgggacattatccaccctggagtttcagcgtgaggccattgagaatgccactaccaatgcagaagtccttcgtaccatggagcttgctgcccaaagcatgaagaaggcctaccaggacatggacattgacaaggtagatgaactgatgactgacatcacggaacaacaggaggtggcccagcagatctcagatgccatttctcggcctatgggctttggagatgatgtggatgaggatgaactgctggaggagctagaggagctggagcaggaggaattggcccaggagttgttaaatgtgggcgacaaggaagaagaaccctcagtcaaattgcctagtgtaccttctactcatctgccggcagggccagctcccaaagtggatgaagatgaagaagcactaaagcagttggctgagtgggtatcctgataaatctgggcttgtcttcctaatgctacctttgttggtcctttcttccttaagtgccaagtgctgagctaaaggaggataactttttggggaagtcatgctgagggtggtagtgtgaccctgcctgaaaaaagggtctcttaccctcccagccctggctcaactctgaagaaggatcttgctacagaaggagcccttgggctcccttctctttgatagcagttataatgcccttgttcccaataaaactgggcagatgg

SEQ ID NO: 448 - DNA, 1110 bp, Homo sapiens
gaatagttttgttgttgatcccatcttgctggtttggaaacaatgcactggctccacttttccactcatgggctttaaggcccccttgagtcccagtctttctcctgacacatggctgtctcctgacagtcccctctgctttacattgttctcagagggtcctgggccatcgtttgagcttcattctttcaaatacacttccctctttctctatcaagccaaggctcccctcccccagaactctgcataggcccttcagcctccatgaatcccttagtgagtgagtaaactaccactggattcagtcactgcaaatgtactttatttaccccttagcactcttactacatgtatgtgttagggttcttcaaagaaacagaaccaataggatacatagagatatataagagaagatttataatggggaattggctcatgtgattatggaggctgagaagttctaccatataacatcagtaaactggagaaccaagaaagctggtggtataatcagtctgactccaaaggcctgagaaccaggggagccaactgaaattgaaggtctgagaaccaagagctctgatatccaagagcgggagaaggtggatgtcccagctcaagaagagagaaagagaattcaccctttctccatctttttgttctattcaggtcctcagtggactggatgatgcctgcccacattggagagggccatcttctttattaagtgcattgattcaaatgctaatctcttctggaaacaccctcacccctcacagacacatccaaaataatgttttaccagctatctggccatccttagcccagtcaagttgacatatataattaaccatctcagtgtacatgtgaattatatatataactaggtctatacctgagataatctgagatatttgtagctgtattaatttgtgcttataatttcatgttatatttcaatgtgctctcagcgctcttctgtgtatttgccctagttctccctttagattgtcatctctttgagaaaaagaaccagatgttctgtgtcatttgcatattttacaatgtttaatctgatgacatgcactcagggaaccaccaccacgaaac

SEQ ID NO: 449 - DNA, 3998 bp, Homo sapiens
cgcctcgccgcagtcggggcagccgctcgcccctcttttccatgtatccgtccaggatcccatgacagattctgttgtcacgtctccttacagagtttgagcggtgctgaactgtcagcaccatctgtccggtcccagcatgccttctgagaccccccaggcagaagtggggcccacaggctgcccccaccgctcagggccacactcggcgaaggggagcctggagaaggggtccccagaggataaggaagccaaggagcccctgtggatccggcccgatgctccgagcaggtgcacctggcagctgggccggcctgcctccgagtccccacatcaccacactgccccggcaaaatctccaaaaatcttgccagatattctgaagaaaatcggggacacccctatagtcagaatcaacaagattgggaagaagttcggcctgaagtgtgagctcttggccaagtgtgagttcttcaacgcgggcgggagcgtgaaggaccgcatcagcctgcggatgattgaggatgctgagcgcgacgggacgctgaagcccggggacacgattatcgagccgacatccgggaacaccgggatcgggctggccctggctgcggcagtgaggggctatcgctgcatcatcgtgatgccagagaagatgagctccgagaaggtggacgtgctgcgggcactgggggctgagattgtgaggacgcccaccaatgccaggttcgactccccggagtcacacgtgggggtggcctggcggctgaagaacgaaatccccaattctcacatcctagaccagtaccgcaacgccagcaaccccctggctcactacgacaccaccgctgatgagatcctgcagcagtgtgatggaagctggacatgctggtggcttcagtgggcacggcggcaccatcacgggcattgccagaagctgaaggagaagtgtcctggatgcaggatcattggggtggatcccgaagggtccatcctcgcagagccggaggagctgaaccagacggagcagacaacctacgaggtggaagggatcggctacgacttcatccccacggtgctggacaggacggtggtggacaagtggttcaagagcaacgatgaggaggcgttcacctttgcccgcatgctgatcgcgcaagaggggctgctgtgcggtggcagtgctggcagcacggtggcggtggccgtgaaggctgcgcaggagctgcaggagggccagcgctgcgtggtcattctgcccgactcagtgcggaactacatgaccaagttcctgagcgacaggtggatgctgcagaagggctttctgaaggaggaggacctcacggagaagaagccctggtggtggcacctccgtgttcaggagctgggcctgtcagccccgctgaccgtgctcccgaccatcacctgtgggcacaccatcgagatcctccgggagaagggcttcgaccaggcgcccgtggtggatgaggcgggggcccagactggttcctgccgcgtgtaggctcgtggcagaggacttccatgtgtggccagagagcgctcctccctggggcagctgagcgtgtgccccaccgtcctgggaggggtgaggtatgagcgctgacccctgcctgcccccgtcccacagggtaatcctgggaatggtgacgcttgggaacatgctctcgtccctgcttgccgggaaggtgcagccgtcagaccaagttggcaaagtcatctacaagcagttcaaacaggtacccagtcacctacaggcagctcaaacagatgcgcagtcacctacaggcagctcaaacaggtgcccggtcacctacacgcagctcaaacaggtgcgcggtcacctacaggcagctcaaacaggtacccggtcacctacaggcagctcaaacaggtgcgcggtcagctacaggcagctcaagcgggtgcgcggtcacctacaggcagctcaaacgggtgcccggtcacctacaggcagctcaaacgggtgcccggtcacctacaggcagctcaaacgggtgcccggtcacctacaggcagctcaaacgggtgcgcggtcacctacaggcagctcaaaagggtgcccggtcacctacaggcagctcaaacaggtgcgcggtcacctacaggcagctcaaacaggtgcccggtcagctacacgcagctcaaacaggtgcccggtcagctacaggcagctcaaacaggtgcgcggtcacctacacgcagttcaaacaggtgcgcagtcacctacacgcggctcaaacaggtactcaggcacttcgggaccccagagggtgccagagtactccagcctcgaaggcgggacaccgcgcttcccgtgtgggggtgctgggtcctcgaccctcaacaccacttaggccgaagctggctgcacccctcaaaccatgaagctgagaagcacccactttacaagtgcagcagccggagaggaggctctcatcagtgcaggctcatccacaccagccgtgttttggggacttaaggaggtcattcgcgctcagaggctgtcccgggcaccatgcggcgtctgccggggtctttctcctgcccagcctcatttgcctgtgcatgcacttggttatccaacaagagctagaacattctgggagaagcccacggtggctccttgccgggctggtcagactccgtggttgtcctgagacacccaccctctgctgccctgagggtggcccaggaaagtttgtgtgaccttccacacggatcccctgggacatgcaggtgtggctcttgacactggaaaggctgagggttctgcccaaacctaggagtgaattcgacttctttcccatctcacacacacacccgagacgtcacccgaatccacgtatttcccacgttcggctgccactgcctcccgggtgggctttgcaggacccaccatcgcatcccctctcactccacagaaaactcgtggggccatgttccccctgccactgaccacgcttcccttgcagatccgcctcacggacacgctgggcaggctctcgcacatcctggagatggaccacttcgccctggtggtgcacgagcagatccagtgtgagtggggccctgctctgtgcgtggggttctcactggggtcaggccaccaagcctggcctctgccatgggcagcagctgggccccccatcccctgcggggtgttaggggagtgggtggtgccgaccttcagtgacacccagtctttatgcccgggcctcccacatgccctgggctggtgggctgtacctgtgattcctgcagggacccctcatcaggccacactgggtagggccctttgtccagcatgcagaggctcaggagtccaggccccttgcctccggggaggccagcagtcttggggattctcagggacaagcccagaaacatctagaagggtttcaagtcctgaccctggcattcggagggctgctctgaatggaagcctcatgtgggtctcacaggagccactgatgggctgtcctcagagccccgctcccagcaagctcatgaggttttgcaactcctgagcgcatccccgggcgtccccaccacatccccacaggccaggagagtcgctcgcaggttttgggtcatagatggcagccctgggcctggggcccacaggaagagttgggaggggccctggagcctggagcctgcccacccaccaggcctgtgtgcagggggtgagcgctcggtggctgaggctggtccgtgagggccccaagtctaaccccatctcccgtccttggctctgcagcgcaggaccaggcctgggcaggcgtggtgggggggcctgcaggtaggtatcacccacccctcagaatggctctcaggctcagattcacagcctccccatggcaaatggaggccttccagggtcctggacccacccccaagcttgggtaggagggatccccctcttaatctcacatttacttgtgtttgaacatctc

SEQ ID NO: 450 - DNA, 1485 bp, Homo sapiens
cccagtcctaaatcaaggaatattggaacattgttagtttctccaatggattgtaagttagcacactgattaagatgcatctgactctagtggaaaatgtcctcaattgatgtctcttcttattgctattttttatttggcatttctgcctgctgcacaacacagttccttctgggaaactataaacccgtatttaaaggatatggctagtttgaatgaagttaaggcagcgatgaacagcagagatactgcagagaaccttagggggttattaggagagagcttaactcagtatactcgcttcttttttaagtaagtttccatgtaatatgctcctgtgccctgagaatgctggtcaacacattccactgaaccaccttctggggcagagatgagatatgatgagctcgctttcatttctaagatgacacctgtgcataatcaccaaaaggtggagaataagcaatgcacttttccaatgcgtgttgtgattcacttccctgagagattgcatccagaatgctgcttgcaattccagtcttatgaagagtggttttacttgcaggggatgataagcacacactgggcaacacccttgccaaattcaagtatggatttttactgagccgaatttcttttggtggttctcccaagagtgaagtttgattcttagaggcagcccctgaacttatctctgtgccttttggctggccttgctgccgcttatggtgtcccaccagcaagcttccagcagcaaggtttggaaagctctgaagataaggctgcgaccctgagaaatttccttctgccattcccaccgtggctggctgtttctcctgagtattactgtgccctggcccagcctgtccagcaatgtgctgatttggaaagaatggtaacatgcccattccagctgttatcgttgtttgagttggaatcaggctagatgttttatgtgcttctccaggatgatgtcccaactcctttttcaatggaagcactgaccctatccctagtgcagtctgaagtaccacagctgggggctctccaagtaagccgggtttattattagtatgaatattctcaaacttcattaattgttgttgtgccagtggtatatgagaagattctgatgtgctttattcaaatgtaaaaatgcaggagagatggatggattcatcagatgtggcaagctgtgagggtgttccaagaacggctggtttaacagctcgtccacataaactggggctgtagaagaacttgcaacatggcagggttgtttaaacttttcataatttgtactggatttggctctggaagtaagcccttttgattactgtgcatcacacgttgagccgctatcaatgctgctaatgtacttcgccctggcgctccaggagcacagaaggaaacctggactttgctgcccttgatggtcataccgtctgctgcctgctggacctcttcagcctgctccgcagtgcg

SEQ ID NO: 451 - DNA, 1016 bp, Homo sapiens
gcagacagcatttgcatatgcaagactcagtagccaagcctccactgccaattgttgaaggcagtttcagatcgccaccttttgaggtacatttctttaagcacaagagaagtagaaatggcctttgccttgtctccagtggtttgtccctctggtgcctcagcagataccagagcttattcttatgaccatttggaagtagtcctcaaagtaaagatcaagaaaaaattggattctttttccattttctcataatagtagcctagtcaacacaagactcccataaaatatgactcactattgggagccatactattttataagcttacttcctgctgacaaaactagctttcctcaaggaaatataaaggaggggaaagtcacatagtgttaggaaaacattcctgtgttttgaatacgatgaatccataggatagagaaaaatctgcttgttctattctgagagttctctgagatatcccttcactctgcttggcatttggccattgatattcaacaggtcactgaccaagcttttctaaatttttcagagagagttacttaccaataaggtctgttcttaaacctacctagttgattttcatatctttccataaagtgtcatgattctatcatagaccctgacttaacattgtaaggactatgagtcctccattttttaattaatttttttttagcaaattaggacttcggcaggttttcctctcctaaactcattctttcctccacaggattgctttgtccatctcctgctttcatttcaagtgcataaacaaaacctcaaagggcctgggaaggtgaggcaggccagagtctgtgttctgtgttgagtgtcaagctatttgttaagaaggtctgcaacaggcctttggtgtgggctctgccagagactgttctgaacactttgcttgagatccgtgccctgtaaaatggatatgatgttttactgatgtctgtaatacatttgtaaacttccaataaaatttgaatgaatg

SEQ ID NO: 452 - DNA, 3167 bp, Homo sapiens
tttttttttttgatgtaacatttgttattttattggaaaaagctggtattaacatatttatagttttattcaacaattgggtaatttgtgagacaccaaagaaaaaaagaatgcacctatgagttacagagtccaaactgatcagggctgacaacttgaccaccatgtatcccacaccaccacccccaccaccaccaccaccaacagcttcgtcctcagagaagagctaaattaaaaacaaaaccaaaaaaaccccaacaacttcacaatgactatgtgaacgcccgtacattcgagagtaccaggaaatgtaagcagagccaggatgcaagtctgtgactattacactggtccttccaccgtttctggttttgtccctcccctcgacaccttttcttaacacacatttgatcttcacaatttgctttggacatcattattttccagggatccagagacatacttttcttcaaagaagatcttttcctttctttttttcttctttttggtttggtacccaaagtttaaaacagaagtaaggaactaggaactgtattaagacctccttttgaaggacatgtaagatttgtactttgaagatggtaaatgttaaatctatgatgtgacagtaacctctagctgcaaatacaagtttcttctcttaacatttgactcacaaagggagatggatcgtagcaaatatccaagtaatgggtaaggccctcagagctgggttttggctttaacacgctatctatacaattgaccacattctcgaacctctttacaagggggaaaaaagtaatccaatcctttgattgttaaatttaattagaatagatatgtacatataatactgtccaggtcaactggattttatagtgatatataaacaaacattcttcattcacgttgattaaaaaaaaatcaatgatccatttccctgtgtaaatgttatatggccagaagtgagtacacatgcactttgtgcttttacacacacaaaagtatactgtaatccactgagaataacctcagctgggtctgtttcctgggttatgttatatcttgtaaaaaacaaaacaaaacaaaaccaaaaaaaagtttggatttggctgggtctctgctccccactttctgaatcaaaatgccaaactacgtggttctgctgcaagtccatgagcaaagacgactcagaggggtgggcaggtttggtatcaccagaacaggagcatctaccatggaaacaccaccttctctgtggccctcattgtcagaggggcagagttcccgagggatgtgtcctctgggactgtgtggtccttaaagtaaaggtatcctaaaatggtcagaacatgcaatttcctttcaaaggcagttcagtgcattggctcaaggagggtgcaagcccaggatgaagtggagtcctggggagggccgcactcctgaagccaccaagcagagcgaggagctccggggggtcttctctgtcttccatcctgcgtctcagttctcccggacccttgtcctacttcacaagacagaggcattcctttccaaaccttccatttgaatgtcgctctaacatgagccgcccacgagatggactggagagaaccttgtgtgaagacccggacgggttcctgacaccactgcacggcacctgccatgggtgacctgtgcatccgctcagagcctcagcttcttctcgtggacagaggggatcctaagggttcccgcttatccccagcatccagcccagagcctggcacgcttcgagaagttggtgtttatggaggaaatgaatgaacacccacctcacagtcaggaggaagattccaaaaaatcgtgcatgggagtcagtgtccgctccgggaaggtgcccagtgaatgctgaagggtgaggcggcagggagggctgcagggggtaagtcaactgcctctagggctgagcaccacgcctggtacacagcagaggctcagcaaatggcaggtgaatcagatgaggacacaggcacacagaagacaaaccccactccgctcctctcgggaaaccgcaccagacctgggacctgggatgtttcaagacattcagaagacctaggagaggagcttgcatctgcaaattctcagcatgaattcaccatccaaaaaacaacggtgaggtcatcagctctgagacagggcgaattgccccatttataaccaaaagaacccctggctggctcgtttgagactcatcatctgtccctggagccctgatctgggaccagtgaggcatgggggagaagcagctcccatcagctccggtccctgcaacaggacacactggagtgaaaaattaacccggacgcataaaaagtcctattgatgtggtaaagaccgcagaccgagacaggaagggacgtgaatgaaagaaccctgaactgtaagactccacagtcatgtccattttatgatttgcggcggtgaacgcttcctctccttttattttttaaacagacaattactgccaaacacaattctggcctaggaaagctggggcagggagggggcccaaacttcctgtgtccacacactgccacctctgcagctgtcctcatcagtgctgtgactttcttcccctccttgcattgcggtcgtgaaggtcatgtcggggatgacttgcatgaggctgggtggcaggggccgggatctgcacatacctagtgcatgtcagagtttaccttgtcctggaagatgtacaggttgttggtggcggcaatggcaatgatgttctcagccgggtgccaggccgtgtgcaggatcttcttggtgaagtccaagctgtccacactgatgtcatcacgccggcgcttgccccccacgcacacgcgccgtggcttgagcacagcccggggcttgctgctttccctcgaggcctccagggtcacgtcccgcttggtgttccgatcgaacatgcggaagaagttgttgtaggccccggtcatgatgacgctgtcgctcccgttccaggcacattcaaacttgtcgaaaatgcagtcgttctcgtacagggaacagagcttgctccgaaggtagtcatggacctggtaggtctctatgggtcttgcctccatgttcaggtcccagaccttgactgtaaggtagtcccgggtgagcatgta

SEQ ID NO: 453 - DNA, 793 bp, Homo sapiens
gccgctttttttttttttttctgccgttctagttcctcatcatctgttttccacacaagagagatctttttgaaatccaaatttgatcatgatacatccctgcttataatatttaatggctttctccttaaataaaaataaaattctcaaatgttcaggtggcccttcaacatctggtcccctagttaggtctccaggcttattcaactgctttctccttgctttctacacttcagccactcagatccatttgagtccttgtcttaggcttttccatgcactggctctcttctggttttctttttctctgtctgggagccaacctattctctcctcaggctgactaattcatcattcatcctttagatacctgcttaactgtcattccctcagagactttttttcctttttctccttaaaaaacaaaacaaaacaaaacaaaacaaaaaaacaggatacatgtacagaatatgcaggcttgttacacaggtatccatgtgccatggtagtttgctgcacctatttatctgccctcttagttccctctccttactcccctgccccaacaagccctggtgtgtgtgttgttcccttctttgtgtccatgtgttctcagtgttcaactcccacttacgagtgagaacatgtggtggttttttgttcctgtgttagtttgctgaggatgatggcttccagcttcatccatgtccctgcaaaggacatgatctcattcctttttatggatgttcatcatcatctcttttacaccaaaaggtctgcaggattcagtttg

SEQ ID NO: 454 - DNA, 2764 bp, Homo sapiens
atcaggttacaaaacaccatttttcccgaaataagacaataagaggcttttctctgaattcctttatattgagcctttcagaattctccctgggtgggcaatttctttaaatagtatttgaccctcagatcaatcctgggaatttttttcatttgggtagcaaaagctagagtattgctgtggcgattataatacttttaaaaagttttaccattttaaagttgccaacatttaattaaggttttcctttgaagcctcctttaatttagggagtaaaatgttagctaaaccaattatatactatatactatacactgtatctcctgtggccatgagaggtgtggctataccgaacagaaacatgcctactgttcaggaaagatgtcagttctggtaacacctctctgtattgggatctgttaattttgtaaatctaaattcttctgctcttggccaggtgcagtagttcatgccctgtaatcctagaactttgggaggctgaagggggggcagatcactgaggtcaggagttcaagaccaggctgtccaacatggtgaaaccctgtctctgctaaaaatacaaaaattaaaattacaaaaattagctgggtgtggtggtttacgcctgtagtcccagttactcgggaggctgaggtaggagaatcatgtgaacctgggaggtggaggttgcagtgagccgagatcgtgctgctacactccaacctgggcaacagagcaagactccgtaccaaaaaaaaaaggttgtctgtgaagggccatgacctggaattgtgcatgtgtggaagagaagagcactgggcaataggtagggtggatctctgaccaagtcatgttaagtatgttcaaagtgaaaaattgagctatggtaatgggctggttttgatttaaatgaagcaagttacctgtcgggcatggtggctaactcctgtatagtcccagcactttgggaggctgaggtggggagatcagtgaggctatgaattggagagcagcctgggcaacatggagaaactccatctttacaaaaaaaatacaaaaattagccggatgtggtggtgtgtgcctgtagtcccagctactcaggaggctgaagggagagaatcacctgaacctgggaagtcaaagctgcattgagccatgatcatatcactggactccagcctgggtgacagagtgagatcctgtctcaaattaaaaaaaaaaaaaaaaaaaaaaaaaggttatgaggctggatccaaatctgtagcactgaactacctgtggaactggagatgtgtaaagaggaaacctcttgataatgaaacactagacagcagcatgacttcagatgctcaacagcaggcccgtttccaattcgtaataggagaggtcaagctggatcacctgcagtccctcctctctgctgttctaagggatgagggactgacaaggggtgggattaaggagatgatgggagaggagtgtgtgagtgtgtgtattggtaagggggcgagttcctccttctgtgcacccttgtcctgggctcctggtgactctcctcagagtgttcgtgtgtgtgattgcacaggactcccacccacagggacacagcttgtcctagaatccagctctgcctcctctgggatacattgaaaacacacactccctatttcccacccagaagcaggtaggtcacatgcaaacagtgatatgataaggcttatttataataatatataaaaaattaagtaaacaaataaatcttggtgtcatataatggcctgcctggttcttctgacacagcttcttcccagataatggccctgttctagagtcattcagcctactgttacagtagtctccctttcctactccacccttaagccccaagacttgtgaccagtggtagtgtgaagcaatcatacttgatctaggcagttgcccaggcttccagtgtaactttgacatttaaaccacagaatttgaaggttcaaggcagttggagctaagatgactctctgccagctataatattctcctggtaacactgagatggttcatcttggggggttggaaaagagccatcattaagcgcatcaggactgcagatcattcacaaagagatgaggggaatgagtggctgccttgacctcagtcctaggatatgcatgcctaaaacttttgtgtttgtgttttaatttctcaagaattccaagtcaaattctgttccaattatcctggccatcgtgggattgatgctggtcacagtcgtagcaggagtgctcattgtgaagaaatatgtctgtgggggaaggtaaggaacacagaagtcaatccaaggtactgagttcaagccagaaggctgatctagggcatatggctgagtctactcttggcaaaaactaggtacttgcagtactgttcctgaaaaatcaggcccaaatcttctcatgtcgtacatttttcatatgtcaaccatggactgtgctttctgtgtctgtgatgcgttcctgagtgtataaaactgagaaagtccacagtcctgtaagaagtgcacccctgctgtgtaccaccgagtgttaaggaggtttctgttcacaggttcctggtgcatcgatactctgtgctgcagcagcatgcagaggccaatggtgtggatggtgtggatgctttggacacagcctcccacactaataaaagtggttatcatgatgactcagatgaggtgaggctatttcttcttgaatggtagtacccccccccc

SEQ ID NO: 455 - DNA, 4153 bp, Homo sapiens
tttttttttttttactcttccaatctttcaaccggtgagtagcaaactgtggcatgtgaatccatatatatatatatacacacacacacacaaacactctcacacacatatgtgcacgtatgtatatacatatatgcacatacatataaacatacacatatatagagagagactatatggatgcatatgtatatatactatatacatatatactgtatagggatgcctgtatatatagttgtgttcatccaaggctggggttttcccaggggtataagacagatattcagaaggcaagggattctagggtatttgtgaaagagattaaaatgttggggccaggcgcggtggcttatgcctgtaatcccagcactttgaaagtccgaggtgggcagatcatgaggtcaggagttcaagaccagcctgaccaacatagtgaaagccctctctactaaaaatacaaaaattagccaggcatggtggcgcatgcctgtaatcccagctactcaggaggctgaggcaggagaatcacttgaacccagaaggcagaggttgcagtgagccgagatcatgccattgcactccagcctgggcaacagagtgagactccgtctcaaaaaaaaaaaaaatgcaacaatatggttcaaaagcactatgttaagtaaaagaagccaggctcaaaaggctataatattacatattccacttatatggaatcttagaaaaggcaaaagttagggacagaagataggtcagtggttactatgggctggggagttgactgcataggtgaaatataaggaaattttgaagggtaatgaaaatattctatatcttacttgtggcagtagtcacaggactatgtgcgtagaaatgtatgccaaaagagtttaattttaccacatgtaaattatacttcagtaagcctgatacatatgaagtatgtgtgtgagcatataaactacacatgcatacatgacacttttgaggtacatgcttccttttttgtctgaatgcatgcaattgaactataactgcccaaaggaaactgcttagtgataggataaacacaattctgcttatacccagctactatcgtcctgctgtgtgctgttctccagtgatgcttagctgcccaaaaacaaacatggtgaagccagttagctgggttcatcaaaggctggggttttcccaggggtgtaagacaaatattcagaaggcaggggattctagggtatttgtgaacgacattaaaatgttgggatatcatttctaatttggaaagcgaggaaagtggagtctgatagatggagataaaaatggaggagtcagaacactggaggcacatggtaaagtttaagaacagttgctgtgagggcatttggcaaacaagttggaagagaagcagagtgtggatgtggagttgtgtgattccactgataatttcagaggtggcaatctgtttcctttcattggagaaggagctccttaagaacaaatgatttatatacagctctgttgagctcagctcagccagccctaactactgcctagaagcctggtctctaacattccaggtgtaccctaaccttctcaaacttctagctcgctcattctcgggcatgacctctatcttaatgcctattaatgggtctctctctactttgcacaatctaacagcttttcttgttcccatcaaaggccaatccctccatatgtgctatggaggagacttattttatcaactacctccattccctctactttgtttctagcttgatctcaatcctgcaccccttcccatcagaaagtcaaattggccagcatttatatgcaggggaaaattggaagttacaatgtgcttaggtttccaacttgggggattagttggacagctgtgttatttgctgagatagcaaacaaaaagaagaacaagttttgtaggaaagaaatcaagtgtagacagattaggttttccaacatcaaattgatctgctgagtgaataggctcacatattaatgtcaatgatgaattaaggtttagaagtcatcacacgtgagtcataattaaaaccacaagagaaggcaaaatcatataagcagagagctcagtagggaaccctaggggacctcaaggttgagcaattggcagaaaaggaagcactcacaagaagatgaagaaggaaagttcctgcagagaaaaggaagaagagagtcacagaaaccaagagaacagagagtttaaagactgaatgagagaacagcccaacaaatccaacagaaagcaccactgatatacggattgggttcagcactcattaggaaaagcagcatgaaggccacaggtaaccattagagcaaacactactggtgccttgcccataaccccttgcccttaccactcttgtgctcagccccacttccaggtgccagcacttgcctttcttttcctgagggcttttatcttgctgctgcagtccactttgccatctccttaacaagctagacgtgtcaaagaatgaatgcccccatccttgaagcagcgttggctgactaatgactgacgagaactggtgtataaatatcccagttcctccacccctctggtaagataactgacgcacatgtctacactgttccccagaggtcctcggcaggactaagtcccaggaacccacggtgagaattggttagataatgcttttttttaattggctctttcccttccttatcttgcttcccacattcctccagtgtccccttcacctcccaaataaacttcttgcccttgcattgttacttctggaggaatctgcacaaggggaattccaggggcgggggtgctaagggaagaaattagaacacaatgaattgaagagcaaatgggatttgaggaagtaaagatgacgagtttacactattctttttaaaatttgtctaaggtagagagaaaaaaggatagggccagacgtgaacaaacagtcaatatgagagagcaaaacacgtcaaaatgctaatgagaaagagacaagatacaaaggctgaagtggttaggggggttgctaagttgtacagcaagacctcaaaggagataagaggttggaagatcacagggaggggtgggggactggcctcatcagcgaatgaatgcttcaacctctgaggctgaggggaaggatttaaagacagatgcatattctgatgaacgtgtgggggctggtggagccaggacagtctggggagtggctggggttcatccatttgtggtggcaccaacccaccaggctataaagcttttcccaaactgcactcagcagctctatgcacacatgaccatcctcagcagctggaaaaccaatgcaggcaggttgtgagcttgatctagaatcagggatttataaaacgagtgttgaaggagaatgagagacaattgggttaaggctatcagagaaggcgtagttaaccatgtggtctggaccaggtaaggacctgtgaccaggcagaggctgtcacactccaaaacaacacacagctcccaggactggaagcctctctggctaacctaggcctctgcaaaagcatctgttctgcataagcattgtgctatagggaccaccaggatgtataaaggactgctcccagataggaaagagtatatgccacagatagggcaaaattcaagagttcagtcacccaaactaataaaagcaataatgcaacctgagacacaggcagaacaagagcctgaacagaaagcaaagagctcaggccttttctctagctctgctgttacctggaaaatcatagtcttccaggctgcttgtgtgcagggctcaatttaataatataaaacatgctgtgcagaaaaaaatgagtcaaaggcacacacagcacttcccaatatatgtgactgattgactccaaattaaccacccacagccatggtggttttcaaagaaccacagatccccagctcccaaaagcagaacactgaaaccaaaagaggcccaggacatacctgttaaacccaaaggcaaggacaaccttgtgaaatcctaaaatcttagaactgagaggacagaataaactaagagggagatgccacggtttcctcctatcaaatattatgaatgctaccatgtttaatcgaaaa

SEQ ID NO: 456 - DNA, 2546 bp, Homo sapiens
ggtgggcacctgcaatcgcagctactcaggcggctggggcagaagaatcgcttgaacccaggagttggaggttgcagtgagccaagatggcaccactgcactccagccagggtgacagagcgagactctgtctcaaaaaataaaataaaataataaaataaaatacatttattttaagatttcctttacttatgtctccatacataaagaaccaaaattaagtgacattagaccagcgaggcaagaattttccattgattcaaaaagtaagatctgcctgatgtgtcaatgtcaggctcaaccagaaaattagagtgctgtgatcacttgctatgcagcggggccataaagattgattttgtttacaaacatactcatatgtaataatttatccactgcttcctgtgtcacatcccatatgttccctcatttaatccctaccaaattaaatctgtgaggtatgttgaatcaatccattctctagatttggaaaccgggactggaagtgcagtatgtccaaaatcacaacgcaccatggctccgaatacctccaggcctacatcctggaagtgtgtgagagtcatttctcctattatctgagcctttaatcttctcctaaggtcagtttcaaccttacttctcagctctactgacttctgctatccactgaaaagtgtttctggcactctagggaacttaactattcttggcagagtacttgacatgtagtgagctcttagccaatattttttagatgaatgaatgaataaacatagaagataatattaaaattgacacttaatggaaggggaaacaggcatcaagaggttaagaaactttctccaaggatacacaactagtaagtgatggagctgggattcaaattctaaagcacatgggatcagccatcaggatgtcaaatttatcttcattagaacagaatacgtccaacctaaatacctcaccagactcttaagtaacacgaaggaggaactgggtacctaatacagtttattccctatgtcgtcctacaaggcgataggcaaaaattctcgtgtaaaaatgaactgaaggcttaagctttccctgctgtattccctcctgaactttgagtcattcctgtgatgaagtccttgtctagctcacagaatgaccttgagcaagaagctttcctttacagcctttgtttcctcttctgtaaaatactgttgacaggacttgttttacctgactcacagagatgcatttagaaagcactttggaaagtacaaagctttcattaaaagcaagcaaatattttaaatgtcgttgttatatgactgcttaaaaaggaccttttatatggtgaaaagaaaccttagcttatcaattgtgcagctaaaccatacaaaatttaaggcaggatggtattggtgcaataataattccaaattgatccctttaatgaagaggtaaagaatagtcaaaacttctttctgtactattttgatttactatggagggagccccttaaggagttatgaaaatatagatatgagcctcaaatcctagtttccaatgtgacatttttttctgaacttcatctgccagtcttgctatcaattcagttgcaatgtaatatattactacatttcatttctaggcaagaacattatttactcacaggagaaatactttcctgaggaaagattgtctttgggaactttcaaggacatttgagaaatgctttagcccaagccacaaaattatgagcatttgtttgtgcctctgcattcccagggaaccatttttaaaactctttcatttaagtttattacaaacatccatcttctctttccaaaaaaaaaagcaattaacaaaacttcattgatttccagttttcctaggtgctattttataatacatatatttcaatcaatttgcatcatcatttttgcctcttccaacatttttgtctccccatctaaattttattttaaccttatatgaaaagttttatcacttacaatttacttaagtaaatctacagtcaacattcaccattatttaattacatttatttttctcaatctatatctaatttagcaaactgagcaacaataccatataactacaatatataatatttatatagacgctaaatgctgggtatagtcctaacctcttaccaaattctcacccaaatctataatgaaagtattatcaacattatcaatggacagttgagaaaactgagggtacaaagactttaagtacttgcctgaggtacacaactaggtgactggcatggctgggaatcttctgaatagaatcgctaggcagtatctgcacctcctccttccaataaaaaggaaacatctatatctgaattttgaaaactcctaagggttacttaacagtgattgttttgaatccatatcaacctgcaacatttactgccgccacccagccaccatttcagtttcttagacaacagtttgttctgcatccatatcagcatggagcatagtatggcacacatagtcggtatgaatgaaaaaaaaaaa

SEQ ID NO: 457 - DNA, 505 bp, Homo sapiens
ctcttccaatcttttggattttatttcctaatgctaacatttcccaaaatggttaaactggcttaagtatatatatcacattactgatatataatgctccatactgctttttaaatttcatcattatatcttaccaacaatgaaagaaatgctcagatcttcctaaatcaatacatgtctacatgccagtcattcctccccaacacacccatatttaactgatataaaatggtgaaggatgatttataatgtgggatagttaaaccaacaaaaattaaaattttcatatgggcacaatgttttgttcctccagcaacagaaaatgtggagataatcctattatttgtcatttatgaagttgtaattgtcttgattctatcagtaaccacacacaaaaaaatcaacaacatactcaaaatcactagtaagtgtcagagctagaatctaagaatgaatctgtctgactctaacacctgttttagataatatgaaaaaattccccccc

SEQ ID NO: 458 - DNA, 3410 bp, Homo sapiens
gtggttttttcgcacagacccgaatagcctgcccctcagccacgctctgtgcccttctgagaacaggctgatatgcccaagatagtcctgaatggtgtgaccgtagacttccctttccagccctacaaatgccaacaggagtacatgaccaaggtcctggaatgtctgcagcagaaggtgaatggcatcctggagagccctacgggtacagggaagacgctgtgcctgctgtgcaccacgctggcctggcgagaacacctccgagacggcatctctgcccgcaagattgccgagagggcgcaaggagagcttttcccggatcgggccttgtcatcctggggcaacgctgctgctgctgctggagaccccatagcttgctacacggacatcccaaagattatttacgcctccaggacccactcgcaactcacacaggtcatcaacgagcttcggaacacctcctaccggcctaaggtgtgtgtgctgggctcccgggagcagctgtgcatccatcctgaggtgaagaaacaagagagtaaccatctacagatccacttgtgccgtaagaaggtggcaagtcgctcctgtcatttctacaacaacgtagaagaaaaaagcctggagcaggagctggccagccccatcctggacattgaggacttggtcaagagcggaagcaagcacagggtgtgcccttactacctgtcccggaacctgaagcagcaagccgacatcatattcatgccgtacaattacttgttggatgccaagagccgcagagcacacaacattgacctgaaggggacagtcgtgatctttgacgaagctcacaacgtggagaagatgtgtgaagaatcggcatcctttgacctgactccccatgacctggcttcaggactggacgtcatagaccaggtgctggaggagcagaccaaggcagcgcagcagggtgagccccacccggagttcagcgcggactcccccagcccagggctgaacatggagctggaagacattgcaaagctgaagatgatcctgctgcgcctggagggggccatcgatgctgttgagctgcctggagacgacagcggtgtcaccaagccagggagctacatctttgagctgtttgctgaagcccagatcacgtttcagaccaagggctgcatcctggactcgctggaccagatcatccagcacctggcaggacgtgctggagtgttcaccaacacggccggactgcaagaagctggcggacattatccagattgtgttcagtgtggacccctccgagggcagccctggttccccagcagggctgggggccttacagtcctataaggtgcacatccatcctgatgctggtcaccggaggacggctcagcggtctgatgcctggagcaccactgcagccagaaagcgagggaaggtgctgagctactggtgcttcagtcccggccacagcatgcacgagctggtccgccagggcgtccgctccctcatccttaccagcggcacgctggccccggtgtcctcctttgctctggagatgcagatgtacgggccacccctgccagggcctgagcaccggtgacacctctgacatcagcggggtggaagtgccctttccagtctgcctggagaacccacacatcatcgacaagcaccagatctgggtgggggtcgtccccagaggccccgatggagcccagttgagctccgcgtttgacagacgggttttcgaggagtgcttatcctccctggggaaggctctgggcaacatcgcccgcgtggtggcctatgggctcctgaacttcttcctttctattctgtcatggagaaaaacctggagttctggcgggcccgcgacttggccaggaagatggaggcgctgaagccgctgtttgtggagcccaggagcaaaggcagcttctccgagaccatcagtgcttactatgcaagggttgccgcccctgggtccaccggcgccaccttcctggcggtctgccggggcaaggccagcgaggggctggacttctcagacacgaatggccgtggtgtgattgtcacgggcctcccgtaccccccacgcatggacccccgggttgtcctcaagatgcagttcctggacgagatgaagggccagggtggggctgggggccagttcctctctgggcaggagtggtaccggcagcaggcgtccagggctgtgaaccaggccatcgggcgagtgatccggcaccgccaggactacggagctgtcttcctctgtgaccacaggttcgcctttgccgacgcaagagcccaactgccctcctgggtgcgtccccacgtcagggtgtatgacaactttggccatgtcatccgagacgtggcccagttcttccgtgttgccgagcgaactatgccagcaccggccccccgggctacagcacccagtgtgcgtggagaagatgctgtcagcgaggccaagtcgcctggccccttcttctccaccaggaaagctaagagtctggacctgcatgtccccagcctgaagcagaggtcctcagggtcaccagctgccggggaccccgagagtagcctgtgtgtggagtatgaccagaagccagttcctgcccggcagaggcccagggggctgctgccgccctggagcacagcgaacagcgggcggggagccccggcgaggagcaggcccacagctgctccaccctgtccctcctgtctgagaagaggccggcagaagaaccgcgaggagggaggaagaagatccggctggtcagccacccggaggagcccgtggctggtgcacagacggacagggccaagctcttcatggtggccgtgaagcaggagttgagccaagccaactttgccaccttcacccaggccctgcaggactacaagggttccgatgacttcgccgccctggccgcctgtctcggccccctctttgctgaggaccccaagaagcacaacctgcaccaaggcatctaccagtttgtgcggccccaccataagcagcagtttgaggaggtctgtatccagctgacaggacgaggctgtggctatcggcctgagcacagcattccccgaaggcagcgggcacagccggtcctggaccccactggaagaacggcgccggatcccaagctgaccgtgtccacggctgcagcccagcagctggacccccaagagcacctgaaccagggcaggccccacctgtcgcccaggccacccccaacaggagaccctggcagccacccacagtgggggtctggagtgcccagagcagggaagcagggccagcacgccgtgagcgcctacctggctgatgcccgcagggccctggggtccgcgggctgtagccaactcttggcagcgctgacagcctataagcaagattccgtctc

SEQ ID NO: 459 - DNA, 1656 bp, Homo sapiens
attttgaagtgatcctcaatattatttaatacctaaaaaatgaaagaaatgtaaaacatgcggttatgcccaagtaagggcaattctgtaatgaggaagttctatttttcttctctattatttagagccatctactataaccatcttgtttactttgtagtgtgtgtagtttgtgtgtacatgtgtatgtataaatcaggagaccttctctggggaaagtacttttcttaaattgacaagtagacattagaagtaatgagaatattctattttttaaaaatccatttttccaagattgactattgatacatgcatctgatatatgattttaggagtctctctggcagagtggtgtccataatttgtttttattaacgcttactttcttcaagcaatttattggttaattagccagacaggttaaaattagttaagaacagaaattgggagaaattcctttgcttttttgggaagtcataagatgttatttatgtttcatattacgcagccacaggtctttctcaaaggctttttaacatttttttgattttcagaaagtatatgaattatgccaaattttgagctaaaatgctaattattagagtataagaattatgtttcttccataggaaataactttctgaaaatgggtattatttattctatatgcccgttagaaatttgtctgcttaattgaagatatagtattaatttttgtatttattggatagaaactctaacaaaatattcaatgcctgaggcagggatttactttaaagaagaaaattacattttgcttgattgttctatgttctgctaaattaaagcccctaagtttgaattttaaaataatgttagggatgaaagtgatgtatataggcagtaacaatgaaataatatgataaacgattgatgttttactttcagcaagcatacaaacataaataaaaatacgtctaatattacgtactgttttctgatgtactatttttatgatttttctgaatgatatccattgtctgttttgttgtctgtgaatgacactatccctacaaaagtctacttgtaagtatttgaaagagccagggggatgcccagtgccccagagtaggcctaccaaatctccaggattccacatctccttgggaaggagtttgatatctatacatgcattttccttgttccccaaaccttccctctactatctaccacaagatcatcagaacaaatttgattatatattatatcaccacaatacaaggtaacactcagatttcatattcatatttttcacactttacattccaaataactcacatttttctattctgatcctatcccccactcatttcctacttctggattcctttcccagtggcctctggcacttactgcccattatccttaatattctctatatactcaactgcttctctgaaagctctttatattttctagttagggccaaaatctggatttttccctgaagacattataataggctgttcctgctttctgctctgtaactctcatatcccagagcttggaaatagtggaggcatcctgcattccattctttggaatttttaaagccataaagccgttcctacccaaatctttgaatcacatgttttcatacagccaccaccacgaaac

SEQ ID NO: 460 - DNA, 1588 bp, Homo sapiens
  misc_feature 926: n = a,t,g, or c
cgtccgtccgtccgtcctcctcctccccctctttttgtatgcttgtgtgtgtgattgtcgagtgaccgaggaccaacacttccgaaaggtgggtctgaaagatgggtttctgacgacccgggggtggttgtagacaatttacagagatcaaccgctggaagttatgggcctctactgagcatttgaggggccgagtttgaagcggttgctgcttcctttcagtgacttggttatgtcctcagtagcttgcggttatgaaaggcctagaggttttgttcgatttgaagctgtcattgagctgtaatgattcatcggaagaaaaaggacaaaacaacctccaagaaacctctaccaacctccgagaaatcatcctcccgctcgggagtactactgtcttcgctccgggcccataacacttgggggtgacaattctgaaactatacctggtatctggttcttacttcagggccataaaactaagatcgcccacactctccccttaaataagacatctcgatggactagtgactaccatcctttttttggtgtgagctacagagctgagcctttggtctcttgtagcagttgctgctttaggcaaagctcgagcttccttgctgtattaaaaagagtggaaatgaagttagtaaacttttttgtgcccatataatatttcagttgtatctagggttaaatgggctgtagtataggtgaggaaaagatttctggaataagacgttgctcttttacctttaagaaaggatctggggccgggcacgtgggctcagcctgtaatcccagcactttgggaggccgaggcgggcggatcacgaggtcaggagatcgagaccatcctggctagcacagtgaaacccgtctctactaaaaatacagaagaaaattagccgggcgtggtggcgggagcntgtagtcccagctactcgggaggctgaggcaggagaatggcgtgaaccctgggggcagcttgcagtgagccgagattgcgccactgcactccagcctgggccatagagcgagactccgtctccctccagcctgggccacagagcgagactccgtctcaaaaaaaaaaaaaaaaaaaaggatctcggctgggcgcagtgctcacgcttataatcctagcactttgggaggccaaggtgggcgaatcacctgaggtcaggagttctacaccagcctggccaacatggtgaaaccccctctctactaaaagtacaaaaattagcgggtcatggcgcaggcctgtaatcccagctattggagaggctgagataggagaattgcttcaacccgggaggcgtaggttgcagtgagctgtgatcacgccactgcactctagcctgggtgacagagtgagactccatctcaaaaaaaaaaaaaaaaagaaaagaaacgatttctgttaccaaatttattttgtattttttttggagacagggtctggttctgtggcccaggctgaagtgccctggtgggatcatagctcactgcagcctcaagttcctggcctcaagcgatcctcctgcctcactctcctgagtggctgggcacaccaccaccacgaaac

SEQ ID NO: 461 - DNA, 2592 bp, Homo sapiens
  misc_feature 2416,2530,2531: n = a,t,g, or c
agaggaatccctcctccagcacgctgccaggcggtggtgttcagaacccttctgcagacaggaatttgctggacctcctctcaccacagccagctccgtgccctctgaattatgtttcgcagaaaagtgtccccaaggaagtgccaccaggtactaagtcctctccaggttggtcctgggaggctggcccgttggctccttccccatcttcacagaatacacctctggctcaagtgtttgtccctttggagtctgttaagcccagcagcctgccgcctctcattgtgtatgaccggaatggattcagaattctgctccacttctcccagacgggagcccctgggcacccagaggtacaggtgctgctcttgaccatgatgagcacgggtccccagcctgtctgggatatcatgtttcaagtggctgtgccaaagtcaatgagagtgaagctgcagccggcatccagctccaagcttcctgcattcagtcctttgatgcctccagctgtgatatctcagatgctgctgcttgacaatccacacaaagaacctatccgcttacggtacaagctgacattcaaccaaggtggacagcctttcagcgaagtaggagaagtgaaagacttcccagacctggctgtcttgggcgcagcctaacttttcacaagatggacccttcatttcaagcttaggctggcgttacttttgctgtctagtcaggactaatcacggtgtttcagtgcggagtgccaagagtcctatcctgacgtcaggctctgggtgtcaacctctgacttattctgcagatgctctgtgtgtgtgtgtgtgtgtgtgtgtgtgtgtgtgtgtgtgtgtgtgtgtgtgttcggggagagggtggtagcacagggcttgggatatcggcagtgtgggaaatgcgaagcatttctcatcatcatcatctctgctacagtcatgtttctgcatgtcagcgagcgacactgtccctgcctcaggttggaggttttatcagccaaagtgtttttttcatgtatcgttcgttccattcatccactctgtgccttgtcagcctttgaaaggcttggttgctcccaggctgctgttctcagggaccttaaaagggacctggttagtcttggggcagagagtatctacttgggcactctcttccaagaaagaccttgtctccattttcattagacaatgcttcttgtgtgtgttctggaagatcttctaaatggaatgcttgttgcactgttcccaggcgagtggctgccatgagacctgaggaccacacttgggggaccaatcatgtccttcaccactgtgccttagaatcgcccctggacagagttcctgggcagaggggaaagcagctcccaggccttactcaggcctcaggtccatgggttgggcagccagtctgggcccttctcaggatcctcatctccatcctcatcctcttccttcacagcatttacttggagctctttgtgacacaccatgtcagtcatgatgaatcggccaacagccagcccttgccagctgacgtcacagtctaagatgggaaactgtggtacagatagacatgaagagagcttagcagtgattgaggtggtgactaaatatacagtcattgaataaataccatgtagcaagtgtactttgtggagtgttgagtaagtggaaaatggaaagccagttgcatttagagatgataggcctaaagggaactgtcttctgtcgagaagtaaaggaaacttcatgaaggatgtagaagcttagctgcctcagagaagagagaacctgaagatctgaggcaagctggacaggagaggtggatatttgttgatggaagaattcaagtttataatcaattcccacttagcacctactgtgtgctaggaacttgaatgtgtatgtttgacaagtcctgcttggcctgatgggtgggagaaggaacctgagcctggctgagatggctaggcggagggctttgaagtccaagcagctgaactggctgggtgggtttctacctttgaaactgcaagacttgtttggagctcttaattacaatatctgatatttttacagtctgatcttttgacttctacatatagtggaaatctgccaatactaattggtggagatgggaactgtaaaagatcaagtatgctaattttaagcaaatgtaaaaactcataaaacaggtaaacagtggggtgatttcatttgccataattcacataagacgaattttaatctaaaagtactttcttgcttgtattctgtgtggcttttttttgttttttgaggccatatctcactctgtcactcaggctggagtgcggtggtataatctcagctcactgcaatctctgcctaccaggttcaagcgattctcgtgcgtcagcgtntgtgttgttgggactacaggcgtgagcctgcacgcccagctaatttttgtatttttagtagagacaggatttcaccatgttggccaggctggtctcgaactcctgacctcaggnnatccgcctgccttggcctcccagagctgtgggattgcaggcgtgagccaccaccacgaaac

SEQ ID NO: 462 - DNA, 3577 bp, Homo sapiens
aatttttaaagcacacttttatttttcatcccttttagccagaaaattgcattcttattgactcttagaccaagaatgatcctcagtcatttagatcacaaaattaagaaatatttacttttccatagaaatattaaatggttataaaaattataacacccctatgttcctaaatggtgctttattaaaaatgtagatatacattcttttctgttttcagtctgcatttgaagtgtttgacaccgtcaggtgttctggatttaaatgataaaaagcattatccaaaaggaattagtgaccctgaacttaaaaacatctaatagtctctctccctttttctttttactagacagtgtgcctatagtttgttcatatgaaatagtctttatgcttcagatgcaaagtgtaatgtacataacagtatatacttagtttttcaatcatatgagctttttgccaaccttaaagataaatcattggctgctttgggcacactgcctattgggcagtcctgctccacagggagcagtgtaaaaaaaaaaaagatatgtggtggagattttgtacattaaagatattgctttaaaagcctagtgtatttggctaaatgtggattctccaaggaattacgtcttagttatttgaaaacatgcatccatttacatggaagacctctccagcacttagaaatttctgaatggggggagcctatggccattgataacacatccaagatatctttgagataagtcaatgtcttccagggttttttgtggcccttcattgacttttatcttggagcttgtcttggaacttgagggagtttttgtttgtttgtttgtttgttttgttttgtttttaatggatgtgagctgggagcttgacctaaggtaggatgtccatctcagaggcagggggcgccctttgccactctggcagccagaagcccagccttccattgcccaagtccacttcctgttccttgtttttgcagcatgtgacccaggcctggggcctcactgagctgaggacgcctgcatggttgtaaagctgagatgcacggcacagactgtttctctccttcactggcttccccattcattttccataacatccattgttggttgggtatatttttatttctgtcctccaaacttccttgtagcctcattctatcttagtatatctttgggccatttggacaaccttatgcctagagatttggaaaaaccattttcgctttgtttcgggcttcgtttgtaaagtgtctgctaagtttctcttgcttcccctttgaaatactgctagacatgacattctgtgtccatgaagtataaattggatttctgagcaggagggttacatatattaagtttctttgaaaggaatctttcctcttttgctataaatatgagttgccatgatgtaaatatatatttgacacttgctgaaggaaaccgtaactcttattgacgctttagacaagaaccggcaatcttaaaactgtcacaaaattctggatgctgccaacttatcttaaggttccctcaagatgttcatttatatttggggatgtaagcactctgagtccagaaagctaggcagtgctccaacaggtccccacagcagaatcgcacacccccatctctattcgcttgtcttagaattagtcactcgggctctcatggtgccaaaaagaagaatgaaagtggagatgggcatttaaatgtgttaagtacagtgagagtcctgtgagtgaatgctcccctgaggtctaaaaaattagcttactaggctaacaggaaagaaggtaaaaatgaaggccaagaaatagaaatagaaacataaatagaaatatagtagcttgtcactacaatagatgagaacactaacaacttagggtagcccaatctgaggacttaaaggaacaaaatagctatgagtgtgatatatatatatgtactattgtattatgtgcgcacacacacacacacacacacacagagtagttttgttttttgttttgaggcagaatcgcttgaacctgggaggcggaggttgcaatgggccgagactgcaccactgcactacagcctgggcaacagagcaagactctgtctcaaaaaaaaaataaaaataaaaataaatacagataaggtgtttaatttagaaaagggaaagaggcctcttcctgagaattttcctttttcttttaaaaatgcccaaaatttgtcatgcctttggtatttcaagggctaagaatttggtacctagcaacattatgtattccaagaacttattccccgatgagcggttgtgatatgtgaaaagcacattctgcagaattgctgagatgggtgtgttattgggtctctctttacctgatttttaaaaatgctttgtgggaagttttaaatgattatagttacatctgcttacaaaatttgaacaaagtagtgttttgttttttttttaaaaaaaaaacaactagagaggtgaatgtttgctgaagacatccagcctaatatagaaccacacccaactggtgacagcattcagccagaatccagtccttgggaattcagacagctactccataacctttgagaggctttgaccatattcaagaagtgaggggcttctacaggcactggccaacacagggtcttgttgatagaaatattttaatccctggacaaatgtctaattctaataaccttaaagtttgtgtcctgcatatgcagatatttttgtgtgtgcgtgacactggctaataatgataaaaactgatttaatgggggttcatttgattgtgtattataaccaaaacctacgagaactttcctggaaacatctgattttctgcaaggacagtggaggtctatgtgaaagaacaaaagcatggggcagggggttcagaagcagtagtaaaagttgagacccattataccttctttcgagaaaagaccgtaagaatgattctgtttttcagttatggattactcttgttaatttctaatgttcataggattaaatcatttttcttcagtgaaacatttatattggagttgtcaaagattagctgtaatgggaaacttataaaaggggtgttgttgtgagcccagtgctgtacacaggtctttacttatcatcatcatttacttggaaactgtgacttaagtgaattgaaatattaaaaaaactagtttttcccctcatcagtgttctaggttgaaataaacggcgttcttcaaggacctgctatatgttgttttgcttaaagttgcagtttccagccgggtgcgggtgctcacgcctgtaatcctagcactttgggaggccgaggcgggtggatcacgaggtcaggagattgagaccatcctggctaacatggtgaaaccccgtctctactaaaaaaattcaaaaaattagccgggcgcggtggcgggcacctgtagtcccagctactcaggagggtgaggcgggagaatggcgtgaacccaggaggcggagcttgcagtgagccaagatcgcgccactgcactccagcctgggcgacagagcaagattccgtctc

SEQ ID NO: 463 - DNA, 171 bp, Homo sapiens
gtggcagggggcgacaacaaaacagaaaagagggccaacaaggttacagtttgacccaaacctgtaggaaaacacatacagaggaaaagtttggggagaaatgcataaaaatattttatgttgcttgctttctttcatacacttctctccatttacccaccaccacgaaac

SEQ ID NO: 464 - DNA, 1284 bp, Homo sapiens
ctggccgctgtaaggaacactagtacccaagggctcaggagttccgcctctcttccccagttctgggaaaagaaacgaaccatagagatgtggctctcctagagatccgggatgaggggcggggtgcaaccggaagtcgcagtattctcggctcggccattattctgtgcctcggctgccggaagggctcgttcctgtgtcatctcctagcgggctggcgcccaagcggcggtacgcaaggctggagccgcatcgggagcccccagtgagccgggtgggctccggggcgggtgggccttcagggaaggcggcccgggacgcgggcctgagcttgctgggactgcacagccctcggtagcctctcccgggccctgacccccggcatggtccgtcgccagcttcgtgttggggttcgacgtcgtggcctcggctgggcaggcagccggcccgagggaagtactgaggacagcagctccgagtctgtgtgtgtttgtggaccggtgctcctgtctaacggactctgctggcgctttgagaagagctgcctcagtagcctgctcccccagctcaggcctttctgctcttcctcagtcttgtctgaggctaatccacagaaacattctgaggtttccctattaccggtggcgcccagactcttgaggacggatttttttgtttgtttgttttaaggggtggaacgattttagcttttttagtcttttagttttgtaatataatggtatttaaaaatcaaacttgaaaaactcaaacttgaaaccaccccataccaacattacttcaggcaatacattttaacacaaagtactaagaccgtaaactcagaataaatgctggcctttgcgcgcgcgcgcgcacacacacacacacacacacacacacacactcatgggcaacctgtcagcgacgattgttactggttttctctttttgcagcttaccagattaaagctttgtcgtggactggtgtttggaaactgttgttttagaacagtttgggttgtttgggtttcataagtttcttcgtagatggaattgttttggacttctggaattagaatacctgaattcagaatttgctcccatgtctcagttagctaagtggccttgagcggattcgctcctctgatccttttgttttttttaacttctgctttgaaaaccttttgtgagaagctaataaaatgtatgtttaagaatttgttatttttatgttatttgaaaattattcaaaattctttttaaaaattcctttccatcaccccc

SEQ ID NO: 465 - DNA, 1345 bp, Homo sapiens
  misc_feature 1265-1267,1296,1297,1325: n = a,t,g, or c
gtgaaatctccttgagtcccccattgtggccttgaggcttcggcctggtctgtctgaagtttttctccttccacttccattgtacagtaaacaattcgattgggagcaactgacttcaggccttgcacttccattatgacaatctctaaggtgaatgacagtaccacgtcggactttgacagctgaatctcattctcatctcctatgtccaaaaatgcagagttctgtgaacgttttaatttttgtaatttaaattccggaccacctttcgaaactggaagactttccaaattggccattagcaaattcactgaagaccgcaactcttctatatacatattctccatatcttttgctataaatttggggaattttctttcctttgccattttatctgccaattgcagccggccatcaagttcccttctgatctgggctgcttgttcatctgcgttatccagctgacatgcattataaaggagctggtgttctagttttttaatacccagaatctgctgaaacatttcatagagttgttccttgctcagaataagttcagacactgcacttagggccattctatttggctgtttgcacaagtcctcttcacctctgtaaatggcatcatatttggctatccatgagctcaacactgtctctttgctcaagccatctatttctggcaaactccgcacacgtttttctatgtttttcttaaatacttctctgaagtcattagcagaacacccctccactctgtaccattctggccactcggtcactctttagaaaaacctcataataactccgaatgcgttgcaaaatgcttcgtcagctacaatttgggtttccccattgaggaaggcctggaaccgttctttcagtaactgcaactgttgtttgttaagcttctgctgcctccgggctatgtcggtgggctgcttggcgttgaaggggtacgcgatgcacctcacgacgaagacgtagagctgcaggcggatcctccgctcctgctcatcgnttcagctgccgctgggctcatctcgcccctcgctgagcacagaggggctcgggctcacagatctggccgcgccgccgccgcccgccgccccggcgcgtcccgccgcccttcccgagtcggggctggaggagctcgctgcgagctgccggctgccaccagcacatcgcggctttcctcttccagcccctcgtccgactcatctacgctggaagacggatccagcatggaaatcagaaaccccacnnncagcccacgaaccccaagtatttcgccgnnccccgtgcgtgtgcccgcgggtctgagngagccgcggggttggctgca

SEQ ID NO: 466 - DNA, 1330 bp, Homo sapiens
cttccccatcccaaccccttctttctctagattgtttacatatgaagggcttttctctctcagagttgctgtcttctctgagacacacaaatctaagtcagaccattgctccacgccctcccaccttttctttagacctcaacttcgctgcgggtgggggtttggtgtcctaaggagactcctggaagctgaatggagaggaggaagaaaatgaagaaggagtgattgaatgtcgggcaaggcactggctgagctgctgtggctccctagcctaaggggcctgctgtccctctgaggcctagtgaaaaagctgcaggaggtgcatcctccacctctaatcttggaggctattatcttacctccaagcactgagctgggttactgcccaattccatccttccctgaagagagaaggaagtgaaaagtatagtaactccccccagcatttccctctttttctcctcatcggccagcccctcctccagcccccctctggtggcatgccatgccaagagcaacgtgtaaaggaacagagaatatccaatgcagtcaagtccaccctgcccagactttgccactgacttctcccacccttctgtctcccccataatagtttatttggttggtctggactcacttgtggcctttgattaaattcctaaggggcctgaagaagacatttctactgcagagggttagaggcacttgagcaaggcccccacatcccaactctgggagttgtggtgggaggaggcacttctgggggataggaccagacaagataacaggagctcacatggaagcagaagctgtgacaagtttagtagtcccaaaatgggttatatcccttccccctttacatcagaatcttgtgaaatgggaaaacaacagaaggaggggatcaaagatagctgatctcacatgcttcccaggcagggcagaggtgggagtcaaacccgggtgacaggtgggtggagagccctgtttgaggttgtggctgatccctctctggtattagtttttcccctgggagcaggaagccctaggaagaggggactgcagggtccccaggggatctttcctccctcccctgcatgaggcagaggcaagctgcctgccaaccccctccctcaaggaatggccttgcccaggaatgcccaccacacataccctcttctttttttctagtcaaactcttgtttattccttggcttgcctccctccttcctcccctctcaacctttacttctgatttctatttcatggaatttgggattgaagttaaactacaacagtgccgccaacaccaagtcttgcaggattgagtttg

SEQ ID NO: 467 - DNA, 1239 bp, Homo sapiens
ttttttttgtttcgtggtggtggcactctgaaaactgtacagcatttgccagttactactctcctgtgccccctacgatgaacaatggaaatagatactaaaatcagtgcccttaaatgtggagagggaaggatcatatactatttgctctacttttggttagggttgggaagtttcataataaggtgtttaaaaaaaaaagtggccctaaagtactttctgagtcaccacggaaagccattatctttatgctactttgagattaggagcatttcactaactctaattctcccatgttgcacttgggatgacgccctatgcactcggccagtgggctgtgtggaagccccatttcctggtgttggcatgcatgtgtgtgggacacttcgggtgtttctagtcctggtctctctcacagcccctttcagactcctgaaggctcctcagggcagggcccataataaaagctgtgcccactgcaaaagctagccccatccttcccgcctgaacccctgtccaggccctgatgcagacggtgatggcaacaggggccaatccaggcactgagcatctcaccttccacctgatggctgcacttcagttctctgctttctggggctctgttgcattggcggtgatgaggttctccacctgggcttcctcatctcctggggcccggggcttctgattgaaactgcacttgcacctgcgacttaggataaggaggatcccaaccgagaagaggaccacagcgaacaccagtcccccaatcctcagggtctggtaatcataatgaaaagggtccatttccttctccttttcagctgcactggccaggaccatgggggccagcaggctgcagaggaagaccagcaccaactccatggcgtcatggcaagcgctgacagcaaagccaattcgttttcgggcccgatcaaagacaacgtagaagccctccatgataacagctcccataacagtgcccgtggatgactgtgagatggcaaacttgtaacagtcgtcttgggacgtggccacatcttccactggccgcaggtattgctgcggaaggatggtgatgcggaaggactggttggtaacctcacccattaggtagagtgagatgactgggaaaatgttccaaggggtggtgcctgcttgccagcacaccagctgctctcctagccagaaaccatcagggaacttctccgtggaggaggctgccttgatccttagaaa

SEQ ID NO: 468 - DNA, 1483 bp, Homo sapiens
  misc_feature 1064: n = a,t,g, or c
acagactcctctgtagctgagtgaattggggtagttatttgaactcgctgtgtctcggttgtctccgttatgaacagggataataatagtatctaccacacatgcttgttgggagttaaggaaataattcaaggaaggagggcctggtgtgcggacacagaacgctgcgtaacaaccgctgtcaagaccctgactgtgtgcccagataaatattcttgcatattgtattgactccctgcaacatccggagaagggcaggcgtggttatcatgcccagtgtgcagataagggaaactgaggtccagagaggcgaagccccgtccaagttcacacagaagttctgaggccgaggactgccctgctctgcctgcttcccttggtgctcacgctggctggccgggcagagcgctctgtgtgcctggaggtcgaggggagtccctgttcccctgcttctttgcggagcttggattctgcccattttaagtagggcataagggcagaaggggaacctgttttatagatgggaaagaggtggggagggagggaaaactgggcctggcagagcatggggtaggccagggtatggtagggaaggatggggagggggtgggagtctagtttggctcttgtgaccacaccccagcagtggcttccatcacgtaccctggggcccttccggctttggagacagctgtgccccatcgtgccaccaagcagctggctcagaggggaagggtctgcctgtgatgggctgctctgtactcttaccagggacccagtggagggcaggtggggtagcagggctctgacaagctcacagctagctgtgtcctgccttctagtcccccgccactgctgcctgtctctccagagcatgccatggcccaggctgctccaggctgggacccagcttcctcttcaaccccctttcccacctggcaccctgacaagacagggcagccaccggggttctgtgtggcatcaggtgtgacttctgagaagaaacaatcttggcgcgcgccgcttggatgccggagaaaatggttcttgggtgcgctgatcancccaggggaggggaggaccttgcttgggccaggctcctaggtctgtttggttttcagggatggccgactggggattcattgcctctcagaacatcctctggatcaggcacggtggctcatgcctgtaatcccagaactttgggaggccgaggtgggtggatcacttgaggtcaggagttcaagaccagcctggccaacatggcaaaaccccgtgtctactaaaaatacaaaaaattaactgggtgtggtggcgggcgcctataatctcagctacttcggaggctgaggcaagagaatcgctggaacccggggaggcagaggttgcagtgagccaagactatgccactgcaatccagcctgggagacagagtgagattctgtctcaaagaaaaaaaaaaaaacaaaaaaaattccccccc

SEQ ID NO: 469 - DNA, 1960 bp, Homo sapiens
ttactaatcaaatatgattgataatagagaaaaatcaaagaaaaaatgccaaagaaaaaaagtgatccctgacttgtgggcagttgcggtggatggagctgagagagcagcagggcgctctggtttctgctggtgccccctcagtcctcacgtggcattccctgcagcgcgatgaagtgtaaccttaacacccatgtagggcagagggtaattgtccacctgttaaagtaaccaaatagatcaggaaaaactccccacaccctgtgcaggacggtcagcagcttctctgttttccagttcatattatgttgtgcctccactttctatctccagctggttccccatacactgtagtttatgaagacgattttttttttaaccaggccagaaaaatgggaatgaatttagagaagcttgcttttccagaaacttgacacccatgcatgcccagaaacccagtcgaccacaaaaggcagcgagcgacctctcttcattatctctccaggactcccagaccttaccccgggctttttctcattcagtatcagctcagagtctgggtcctaggaatcacagaagcagttagcaatgaatggcaaatgctagactcaacactttacatcctaaaatgtaagaccatcatgagcactgcaggctccctggggcaggcatcacctgtgtgtcacccctgtaagtgaatccacgcttctccaagtgcagtgtgttcacttgtctcttctaaaataaatgaggtggctgttgtggcatagctcctggtggccttcagtagggagtctgaagtcaccaaacgccagctcatgggtggtgtaagctgtggcagcatgacaatagtccctgggcagtgtcctgtccagcctgtgattatttgaaaggcatgtttgccatgtttgccactttccctctttcacattgaggcgtgcacttcaactaagaccatcttgtttgctttatttgaaagcaagagagcagagtccacagcctcattcagttcccattacacagcttcctggtcctgctcctggtaacgtggttccaatgcctgtagtggtgacttacgtgcactcccacttccacagcagggctagtggctaggcagagcccatgcacagaggaaggccctctgactgcagacagcacccctccctctcccagggctcaaggatgcttctgtggcaccctccagggacgcctcccaggaccctgccccatagcacagagaagctgcggccaggccgaggagcccctcccagggggcctcaaggacaccacggcctgatccttgattgtcaccacacctttctgcccatgtgggcttggcccgtgggctgagagaaatgagaccaaagggagcgagataaggttctttgtttctctcctccagggtctgggtgaaaatcagtatgccgcctgtgcacttggagagctagcaaaaggacaccatgagattagcctaggtggtgggttggttttggctttttaaacttaaagtatttgagaaaagaaactcagttgctctccctttatgctgaattttaatgtcactaaggccttttactcatgaaatcaggccaaatacgtatgcaaaatcttacttgctttagtgagaaataggcaggatgaaacaaagatgggagatgattcaagaaaggggtcattgacatttagtgatggtttttagttgcttatactgtagtagtgctgaggcattgttgatgtcagccagctctaggtgttcagattaaatcagctttctgaagttagggaaaccacaatcaggagtggttctctttggatggtcttataaaattgttgtataagttttttcaactagtgtgacagtcactatttacgcctatggcttgattccagcagagattttaacacaatgacctgttttccctccacaaagtgacaggagtagcagccaccaccacgaaaa

SEQ ID NO: 470 - DNA, 1189 bp, Homo sapiens
gagtgcctggggcacaagctctgtaaaagctttgggtacagattttctctgtccaaaaagcaatcctcaggacttgctacgatgtatccctatgtgcaaatacctttgttgaaaaacacggaagccaagcagtggtatagatgaaagcatggtgagccgaactaatcaagtgcatttttgaatgtcatattaaaatgccttagtaagagcatcatgggaaatgacccattctgcacagagactgaccagctttgtcaggcttatgcccagcacctggcttagacaaaggcttcgacaaatacacatgggtgtttatcattatgcaaagccagtgtgtaatgctttttctttttatattacaaaaagtatacacacagaaaacatatttttaaaaatataataattaggaattctactatttgttgatatgcaaaagaagggaattatcttttgctcactatatgtcaggcactgctcagtttttctttaccacagtgaccctgtttggggatctgttccagtgatggggacaacaggactgaatattagaaacctagatcatcctagaaaatctggaccatatggtcacgtacccgtaccttcctcattttctcctaacagggcctggaaactccagcaagttatttggaagtctgtttgatgtcagtctccagggagaagcgatgcgactgttctcttgctgcagtcggatggatgtctgtctgagaaagagggcggagggtggaagaggtgcagggggacccttcaccacaggctttgatctcccttgactcctcctgggatatctcaccttttgatgttgggaatcagttaattactagtcaaaattggtttgagggactaggaaacagtttgaaggctctgttctcaaaatgcctgtactttgttctgaggaactttcaggcaactttctgaagcatctcaggcaaatgagaagggctcggtctgtggcccctccctagtagcggcccagattttgatcctcttgtgctaccatggtaccatcctgatgcagcagacttcttttctcttcagagctctgtggtttcattggtagtgaaatgatgacttttaggattagattgttaaaacatctgtcacaccgcaaagagtatgtagcttaataattccctctttaggtcttaatttgaaaccaccaccacgaaac

SEQ ID NO: 471 - DNA, 1725 bp, Homo sapiens
tgaagtgatatttcactgtggatttaatttgcattcctctaatatctatgatgttggacatcttttcgtgtgctttttgtcagctgttatctttggtgaagtgtctgtttatatctttagcccaattttttatttggttatttattttaaattgagttttgagaggtcttcattgtggttacaagtcctttatcagccataaggcctgcaaatattttctgccactcatcttcttattctcgcattgtcttttgaagagcaacagttattaaatctgatggactccagtttaccaattttttcttttatggattgtagttttggggtcttgtctgagccatttttgcctgactgtaagccatgaagatttttttccttttgtttgttaataataataataatttttttttagagacaggacctgactctgtcaccccagctggagtgcagtggtgcaatcgtagctcatgataaccttgaactcctggacacaagggctcctgcttcagcctcccgagtagctgggactataggcacacagcaccatgcccagctaacttttggattttttatagacccggggtctctctgttttgcccaggctggtgttgaactcctggcctcaagcgatctttctgcctcagccttccaaagtgttgggattaaaggcatgagccactacacttggccacctttgttttctaatagaagttttatactttggtttaacatttgggtctctttcattttgacttaatattttgaatatggtacaaagtgtgggtcagaagtatttggttttgcatggggatatccagtgtttacagcatcatttgttgaaaagactatcctttctccattcacttggctttgcagcttcatgaaaaatcacttatgtctgtatgtgtgattttatgtctgtactcttttttgtattgacccattttcctttatctagatgcggaaacatactgtcttaatcattgtagctttatattgagtcttgaaaccacttacttagtcttggccctccaactctgttctttttcaaagttgtttttaactcttctgagtcctttgtattttcatatgagtcagttcttagaaaaactgcttggattttactggatttgacttgaatctgtagagcaaatttggggaaaattggcatcatgactacaattgatgtctctattaggtctttaatttctttaagcattttttttttttttttcagtgcacacgttttgtgcattgtttgattagatttacccataagtattttatgtattttgaagtactgtaaatgatattttaaaaacttaatttccaattgtttgctagtgtatagtaaatgattatggcatattgctcatatgttctgaacctttgctaaactcatttagtagatctaatagttttttttatatatttcatcagatttgcttgagagggagtctcagtcacccaggctggagtgcagtgacgtgatcttggctcactgcaacctgcacctcctgggtcaagcaattctcctgcctcagcctcataagtagctgggactgcaggtgcacaccaccacgcccagctaatttttgcattttcagttgaggcagggtttcaccatgttggccaggctggtctggaactcctgacctcaagtgatacacttacctaggcctcccaaagtgttaagattacaggcgtgagccaccaccacgaaac

SEQ ID NO: 472 - DNA, 2847 bp, Homo sapiens
ggatgctgttgaaatcctacagtgcacaggatggcgccaggctcagagcgtctaggcgagtgactctgctgcctggctctcctccctggctccccagtgcctcctggaccatgctccacagcgctgcgtgaccccaacctactctgctctccagaaaaactgccatgtggtcatgggccaagtctttcttggcgtccctccttccaaaactaagccaagctcactggttccttcagccctttgactcagactcaggtaatgtctgtgggagcgcctcctggatcgctgccttgtcctcaggtgctccaccccctctcgtagtgctctaggtggtgcttttggtcactgcacaatcacataatattttctcccctctagactgggaagtccttgagggcagcagatacatttgtattttctttttttttttttagagagagagtcagggtgggttgtccaggctggagtgcagtggtatgatcacagctcagtgcagcctccatctcctgggctcaagtgatcctcccacctcggcctccgaaagtgccaggattgtagacatgagccatggcacttggctgtttgtgttctgaatgtcttgctgcagattgcaacattttctttgagcactggcttcagtaaagatgattgggtttaggatggggagttgccctcagagaatggctggcgcagcagggggagggactcgttgacacatttcccacgtcggctgcttccatcttcctgggcctctcttgtaacttgctttcctaagtgtaaatgtcttgattctcacagattctctatttttgcttcctagaaagtttcaattttgtttaacatttttgagcagataatatacgtggttcaaaagtacaaagggagctcagtgaagcctcctagtctctaccctggaacctggttcccctggaagctttgctggaccagcttcttgtgtatccttctagagatactttgtaactttgcaagcaaacaagtgtatgtattctgcttttttccttacccttttctttttaaaaagtttctgaaccttgcctttttcaactatgtttgagagatctttccatatcagtacattttccgggcattctttccatggccgcactgtatttggctgtatggaggtgctgtggaattttcatgctgttaccagcaaggctataggcacagtgttttgcaaatgtacctgtaggacccatcctagaaatagcatctctttcttcaatcaccggttatttcgtcacatcagggtttgctcttggctcttaagggctttatttctgcacttcctttgggcatttattctcctaattatctcatctctctatattttaaataatatagtaggtcaaattaaatgaatgtctcagttggaaactggttcaccttttgtgtgttcttttggttgagtgactggaaatatacacgtccacgcagaagcttgtccatgagtgttcacaacagccagaaagtgagacaacctaaatgtccatcagcggatgaacggataaacacaatgtggtccattcctgcaatggaatattatttggcaataaaaggaagtgagttactgattcatgttataacgtgtgtgaaccttaaaaatatgcaggccaggcacggtggctcaggcctctaatcccagcactttgggaggcccaggcgggcggatcatgaggtcaagagatcaagaccatcctgaccaacatggtgaaaccctgtctatactaaaagtacaaaaattagctgggcgtggaggtgagaggtgacaacgtgctggcagccctcgcttgctctcggcgcctcctcggcgtccgctctggccacgctggaggagcccttcagccagctgctgcgctgtgggggcctctctctggggctggccgaggccagagccggctccctctgctcgcagagaggtgtggagggagaggcgtgggcgggagccggtgctgtggctggcgcctgctgggcttgatctgggacgagcttcctctgggctgccggagtgcccgggctaggtgccgtgaagtcccaccattgagaggtgaagccggctgggcttctgggtcgggtggggacttggagaacttttctgtctagctaaaggtttgtaaacacaccaatcagcagtctgtgtctagctaaaggtttgtaaacgcaccaatcagcactgtgtgtctagctcaaggtttgtaaacgcaccagtcagcagcacgtgtgtctagctcaaggtttgtaaacgcaccagtcagcagcacccgtgtctagctcaaggtttgtaaacgcaccaatcagtgctctgtgtctagctaatctagtggggacttggagaacttttgtgtctagctaaagtattgtaaatgcaccaatcagcactctgtgtttagctgaaggtttgtaaacatactaatcagcaccctgtcaaaacggaccaatcagctctgtgtaaaatggaccaatcggtgggaggtgggtggagccagataagggaataaaagcaggccacccaagccagcagcgcgcaacacgctggggtccccttccatgctgtggaagctttgttcttttgctcttcgcactaaatcttgctggtgctcactctttgggtccgcgccgcctttatgagctgtgacactcaccgagaaggtctgcagcttcactcctgaagccagcgagaccatgaacccactgggagggaagaacaactcctgacgggaggaaggaacaactctggacatgctatcttcatgaaccgtaacactcaccgcgaaggtctgcagcttcactcctgaagccaggaagaccacgaacccaccacgaaac

SEQ ID NO: 473 - DNA, 4307 bp, Homo sapiens
gccgctttttttttttttttggagcttgtccccatgatgtcgctggaccctcctggtccccgagggagtggcaggcacagggagggtggccctctcctgaacgacctcctaggcagcagtcactcctcacctcattgtcacctcgcggacagggacacgagttcagtgctttgtggctggcccaggaccagagttggggcctgtccctgcgtgcgcagcccagcccttacctttcctttcctcttccttcttccgggcagcctcctcccgctgtttccggatgatggccagccgggccaggtcagccttggcttgctctgtcttcccggccaagtgcattttcatgtaacgctcttttgccttctgcttctcaatctcttctctgtgtggataaaatggtgtcatggggacatctttcctaccactgtttgccaaactggacgggagtcagaataaaggccaaggattcggcctagggccgagggtggaaggggtgccctggctgtgagtccctgcctccatgaaccccctgcttggtggacgttcaccaagcaagtgagcaggagggagaggcccagggagaaaacatctgcgatgtccagaaagcctcagagggaaaggggacaatgtccagctacagcagggaggggaagatgcctgagggcttcatgatcaggctctggcggccatggagagaagggggaccaggccaagagtgttccagagaagatgaccaggaggatgaaagcagtggggacacatcctacaaggaaggaagggctgggcatggtggctcaggcctgtaatcccagcactctgggaggccaagacaagaggatcacttgaggctgtaagtttgagacctgcctgggcaatatagcaagactctgtacaaaatagaaaatttaaaaattagccaggtgtggtggcacacatggctaaggcagcatggctcccagctacatgggaggctgaggcaggcggattgcttgagcccagaagttcaaggctgcagtgagctacaattgcaccactgcactccagcctgggtgacagagtgaaatcctatctctaaaaaatacaaacaaaaaaaggaatgaagaagtggaggaagcagccacagggcataggatgaggaccacagtgggaaacagacacacccagtctcaggtcaacaccacatggcccattcttagagcagctcagatgtgcacggtgctgccccccaaggggacagcccccatcagtagggagatgggaataattgctgggctcccatgggacaaagtgtcacgaatgaaccccctaagtagagtcagtggtgagggtcattagcttccttttgaggatcttcccaagcttgagattctgaactggagtggatgcccttcaggatgagatcggagggcctatttgcactgggttcctggaagagccaagtgctggaggaggggagggccctgcctggcaggaggctgggagagagactcggcctcccagaggccttcaaggtacacagaactggggagtaatgagaaaccaggcatgggagctagctagaggggagggagagggactcccgagtgggaagagcagatgcctcactacagagctgaggagataatacctggcgaaccgcagatcctagctcaggagggatgtgccacactcagaagcctctaagctgagcctcaggaatgatgactaaggcagcccaaagactctgcagggcccttcagtgaaagcaaaatgccaggcagggtgtctctgcaaccccaaaggacagaaggagggagcaacaggatcccttttactggagaggacactgatgcccagaaagggcacagccttatcgaaggctgcacagctgccaatggcagaataccacagtggcagaacacccaggttgctgggtttttgaagtcaatgccaagaggaagctactgaagggggacagaagggtccttagcagctgcaatcacacccaagctcatggccttccccacgaggctttcacagacacacccctcagccattatcctaaattcccagtcaggagagaaactagcaggcttcaacctcttgtaaggcccttgaggtcacctggtggctgccaaaagtcagggcaccagtcaaggactgatcctgtgccaggcacttcagtacatgatcttgatcctcatacgactcttgaggaagatatttacagcttcattttcacacaggacttgcagaggcctgggacagctggctgagctgcgctgggctggactgccttctggccggcacaggctcgcagcccccttccagtccccatggccacgacattacagatggatgcaggtcaggaatggtcagatcagtggggtaagggaagtctccccagggtgtggtgctctggaagaggggaatggagggcaaccctctgtatcctgcaccattacctcaagtgttatgctcaggtctgagcctgttgtcctatttcccctgatatcatgtatcaattggtgaaaacaaattctgtgtggctttttaaaggctactggagggccattggggaatgagacagaaataaacagccacagctcccagccagctggggaccttagcatcccacaggccaactgctggcctgtattccccgtgacacaaggcccagccagtgatgttaccgttctctcctcgaaagctcctttggcccgtccagatccagttgtgtgacctttttggttgtctgtgccacccggttggggttctcgatgtcgatgagcccttcaacgcctttgcgcttttgctagaacagggcaagaagctggttgttggagttcaggtcctgtggagcccctgagggccactcctgccatctctcaacagcccatctggatgaggacaaactcctgctccaccccagcccacgtagtgctcagcccaagtctcacagtgggtatagctctctggagcatcttcatcagcctgggaagagcccacagaacggctgctcggggtcgaataacttgcccaagtcaaccaggaagtaggtggtagatgagaggtgcgccctaccccgacttgcaagcactcacacagcactactcccctacttcaagctcggcttccaaaagcagttttccatggaatcccatgcctgattcttcttgcaaaaagcgctgggctggaatccccagggcagggtgggccaagtgtgtgctgtcatgactaattccaattcccacccaccttagctgatggactggacttgtaacccaagaataagctactggatcacacactctacaggtttgggacgctggcccaaaaacctggaatctgcaccttccacctcccctgcagaagttccagaagaagggggtgtgttctcaatgcagcaggtttggtcaaagtttcaggccctgtcaattccatcaattctccttaagggggcagggagacagcttccactccacagagctccctccacacacttccagtccagctgcacacttacacctccactcagatgcctggcactgtaaacttaacatgtccaagacagaactcgagattcatcctttacccaaccggaccctccctgcaatcctaagcatatccttgattcgtcgttccttcagcaacccccaaatacagcttaaatttgtccactcttctccactgccattgtcaccatcctagggcaagccacgattttttttcttttgagacagagtttccctcttcttgcccaggctggagggcaatggcacaatctcggcccaccacaaccccggtctcccgggttcaagcaattctcccgcctcagcctgagtatttgggaccacaggcatgaaccaccacccccgactaattttgtatttttagtagagacaggctttctccatgccggtcaggctggtctcgaaatctcgacctcaggtgatccgcccgccttggcctcccaaagcgctgggattacaggcgtgagccaccacacccggcccaggatttctgatctgaacactgctcttactctcaacatcctatcattcactctccatgaagaagctaaaataatcttttttttttttttttttgagacggagtctcactctgtcgcccaggctggccaacacagtgaaaccctgtctctaccaaaaatacaaaaaactagcccggcgtggtggcaggcgcccgcagtcccagccactcaggaggctggggcagaagcgcttgaacccgggaggcggaagctgcagtgagccgagatcgtgccactgcactccagcctcagcgacaaagcgacacttcatctc

SEQ ID NO: 474 - DNA, 3376 bp, Homo sapiens
gtcttggtaacattcccaaagcagaaaactgcctgacccacagtggggattccctggagaattggggtcccaagaaggaatgctgcccttctcgaacccgttctcccccttcctcctgcctctctgccttttactgctattcccttcttctcctcctttatccttctttctgttttccccatctccactctctcttcaaccaaagtcccaaggaaccctcggggctcaatcccccatggaccacttggcttgggtccatggggttggcatcagttggttggcggaaatgggggaccagttggcatgatggccctaaactgggaaacctcatgtttcttatgtctcacctctttccagagccaaatcagccccttttggaatgatgacttcattggaatgcaaatcaagtcattttggtgcatcagtggctcttaggcctgcacacacgagacatcagaatccaatcctctgaccctgtgccagccctttcccccagtttatttcccaccaaaggctgacctctaagaggtcttgctttctatgaactcaagatgggtcccacctctaggtgtccccaggtgcactcttctaccggttggcttccgatgtgacaaggccaagggcccaaagacttgaccctcttacacccttgctgacatggttccatcatgtccacccgcatgcacttttatggtttcatcacccagcctcttctcctctggcccacccagcgtccaggctctttctccctctcccctcctatctagaatgtcccctgcttctagcctcaccagaccccccaagctcccactacttcttccataataatagtaataacaatggttatcatcatcccctgcacatcccgcctaaagcactttactatatagaaaacgtttcccctggccgggcatggtggctcacgcctgaaatcccagctctttgggaggctgaggcgagcggatcagttgaggtcaggagttcaacgccagcctggccaacgtggtgaatccctgtctgtactaaaagtacaaaaaattagctgagcatggtggtgcgtgcctgtaatcccagctactcgggaggctgaggtgggagaatcgcttgagcccaggaggcggaggttgcaggagcagagattgcgccactgcactccagcctggatgacagagtgagacccaatctcaaaaaagaaatcgtttcccaccccacatctccttcagacctctcagggacaactctgggaggcagccttggcaggacatgggttagtgcgcccattttgctgtgaggaaactgaggtacaggtctcatcccagagcatgagaagtcactgagtttagatgagaacttgggtccaactctgtcctgtttgctgtgcaaatccgctgccctgctgggggcttttggtgggtccagaatacccagaatatgctgctggccaacccaggcataaaacaagtccattctggatcactgagccttgtgtattccagagggtgatctgaggtccccattcagcagaattctctgagggcatgttcagaatgtagattcctgggccccaccttgaatttgcatgtttaacaaactctcctggggttgaggggtgggtgcagtggtcacgcctgtagtcccagcgctttgggaggctgaggcgggtggatcacttgagctcaggagttcgagcctggccaatatggtgaagccctgtctctactgaaaatgcaaagattggccgggtgtggtggcacatgcctgtgatcccagctgcttgggaggctgaggcaggagaatcgcttgaacctggtggggagcagcggttgcggtgagccgagattgtgccattgcgctctagcctgggcaacggaatgagacttgtctcaaaaaaaataaaaaataaaaccagccctccccgggggatcttaggcactattggccacaccattggtgttcgtggccctgattattaggctatctttctttttttaagtttttttagatttattttttattttatttatttatttatttattatttattattattatttttggagacagggggtctccctatgttgcccaggctggtttcaaactcctgggctcaagtgatctgccctcctcagcctcccaaagtgctggggttacaggcaggcatcagccaccgtgccaggtcatcttcctttttcttttttttttggagacagagtcttgctctgtcgttcaggctggagtgcggtggcgccatttaggctcaccgcacctccacctcccaggttcgggcggttctcctgcctcggcctcccgagtgactgggattacaggcacgcaccaccatgctcagctaattttttgtacttttagtacagacggaggattcaccatgttggccaggctggtcttgaactcctgacctcgggtgatccacccgcctcggcctcccaaagtgctgggattataggcgtgagccacggcatccagcctcatctttcttttaaccaataaacatgatgctgtatcttaaaaagagcactgagcagggacttaagggatcgagtcctcaaccaaactgatttaattactcaggattttcaaaaagcatcagaggctatttacaatcttaatcataggggttcagtaaaataaaaataagaagtaaaaaagcaagagaaattattctgtaaatctaactggtgtaattcccataatcatgcaattaagttttactcttgagtttcctgacagccattggtaaaaagagaaacacatcaggatttataatttttatcatccaattatgggaagcaagcatgttggccccaggagacgaactcttctactaatttatagcatgtatcctttcatcaagggccactgagccagttggtgagtcaacgggtgaacctaagatgcaaggatgttttccaggtgactatttaaaaaaataaataatccaccaacgtgattgaccttggcgagatcatgtttctagtctatacctcagtttccccatctgtaaagtgaggataatgtcccaccccatgtaactgtggtgaggaccaactgcaacactgtgcctgcgagtctccttggaaaagtgtaaggttctacacaaatggaaagtgatctgatcacactcagtgtccccagcccagcctttcagtgccctggccctggggtgggggacaatactctcctcacccccttcactagtcttcatgaatagcaaggaggccataacataatttggtctaaaccccttcctttttaaaagaatgatggcaaaatgtgcataacattaaatttaccattttaaagatttctaagtgtctcgaagtacatttgcaatgtgtaactgccaccaccacgaaac

SEQ ID NO: 475 - DNA, 195 bp, Homo sapiens
gtcgtgccacaccatgactgggcctgcatctgctccacctctgctctccgagggccaaaccccctctggatgcagttggctgtcacagaatgcacataggaattcataaaattagaagaatacgcacatataatggggttcatggacgagtcattttccttatttgtttaggatttgtacccaccaccacgaaac

SEQ ID NO: 476 - DNA, 3412 bp, Homo sapiens
  misc_feature 1818,1852: n = a,t,g, or c
gtggttttttcgcacagacccgaatagcctgcccctcagccacgctctgtgcccttctgagaacaggctgatatgcccaagatagtcctgaatggtgtgaccgtagacttccctttccagccctacaaatgccaacaggagtacatgaccaaggtcctggaatgtctgcagcagaaggtgaatggcatcctggagagccctacgggtacagggaagacgctgtgcctgctgtgcaccacgctggcctggcgagaacacctccgagacggcatctctgcccgcaagattgccgagagggcgcaaggagagcttttcccggatcgggccttgtcatcctggggcaacgctgctgctgctgctggagaacccatagcttgctacacggacatcccaaagattatttacgcctccaggacccactcgcaactcacacaggtcatcaacgagcttcggaacacctcctaccggcctaaggtgtgtgtgctgggctcccgggagcagctgtgcatccatcctgaggtgaagaaacaagagagtaaccatctacagatccacttgtgccgtaagaaggtggcaagtcgctcctgtcatttctacaacaacgtagaagaaaaaagcctggagcaggagctggccagccccatcctggacattgaggacttggtcaagagcggaagcaagcacagggtgtgcccttactacctgtcccggaacctgaagcagcaagccgacatcatattcatgccgtacaattacttgttggatgccaagagccgcagagcacacaacattgacctgaaggggacagtcgtgatctttgacgaagctcacaacgtggagaagatgtgtgaagaatcggcatcctttgacctgactccccatgacctggcttcaggactggacgtcatagaccaggtgctggaggagcagaccaaggcagcgcagcagggtgagccccacccggagttcagcgcggactcccccagcccagggctgaacatggagctggaagacattgcaaagctgaagatgatcctgctgcgcctggagggggccatcgatgctgttgagctgcctggagacgacagcggtgtcaccaagccagggagctacatctttgagctgtttgctgaagcccagatcacgtttcagaccaagggctgcatcctggactcgctggaccagatcatccagcacctggcaggacgtgctggagtgttcaccaacacgggcggactgcagaactggcggacattatccagattgtgttcagtgtggaccccttccagggcagccctggttccccagcagggctggtggccttacagtcctataaggtgcacatgcatcctgatgctggtcaccggaggacggctcacaggtctgatgcctggagcaccactgcatatcacgaaagcgagggaaggtgctgagctactggtgcttcaatcccaggacgcagcatgcacgagctggtccgccagggcgtccgctccctcatccttaccagcggcacgctggccccggtgtcctcctttgctctggagatgcagatgtacgggccacccgtgccagggcctgagcaccggtgacacctttgacatcagcggcgcggaagtgccctttcccaggctgcctggagaacccacacatgatcgacaagcaccatatctgggtgggggtcgccccaagaagccccgatggagtccaattgagctcctcggttgacatacggatatgcgaggagtgcttatcctccttgggaaagctctgggcaacatcgcccgcgtggtgccctatgggctcctgatcttcttnccttcctatcctgtcatggagaagagcctggagntctggcgggcccgcgatttgccaggaagatgaaggcgctgaagccgctgtttgtggagcccaggagcaaaggcagcttctccgagaccatcagtgcttactatgcaagggttgccgcccctgggtccaccggcgccaccttcctggcggtctgccggggcaaggccagcgaggggctgacttctcagacacgaatggccgtggtgtgattgtcacgggcctcccgtaccccccacgcatggacccccgggttgtcctcaagatgcagttcctggacgagatgaagggccagggtggggctgggggccagttcctctctgggcaggagtggtaccggcagcaggcgtccagggctgtgaaccaggccatcgggcgagtgatccggcaccgccaggactacggagctgtcttcctctgtgaccacaggttcgcctttgccgacgcaagagcccaactgccctcctgggtgcgtccccacgtcagggtgtatgacaactttggccatgtcatccgagacgtggcccagttcttccgtgttgccgagcgatctatgccagcaccggcccctcgggttacagcacccagtgtgcgtggagaagatgctgtcacctaggccaagtcgcctggccccttcttctccaccaggaaagctaagagtctggacctgcatgtccccagcctgaagcagaggtcatcagggtcaccagtctgccggggaccccgagagtagcctgtgtgtggagtatgagcaggagccagttcctgcccggcagaggcccagggggctgctggccgccctggagcacagcgaacagcgggcggggagccccggcgaggagcaggcccacagctgctccaccctgtccctcctgtctgagaagaggccggcagaagaaccgcgaggagggaggaagaagatccggctggtcagccacccggaggagcccgtggctggtgcacagacggacagggccaagctcttcatggtggccgtgaagcaggagttgagccaagccaactttgccaccttcacccaggccctgcaggactacaagggttccgatgacttcgccgccctggccgcctgtctcggccccctctttgctgaggaccccaagaagcacaacctgctccaaggcttctaccagtttgtgcggccccaccataagcagcagtttgaggaggtctgtatccagctgacaggacgaggctgtggctatcggcctgagcacagcattccccgaaggcagcgggcacagccggtcctggaccccactggaagaacggcgccggatcccaagctgaccgtgtccacggctgcagcccagcagctggacccccaagagcacttgaaccagggcaggccccacttgtcgcccaggccacccccaacaggagaccctggcagccacccacagtgggggtctggagtgcccagagcagggaagcagggccagcacgccgtgagcgcctacctggctgatgcccgcagggccctggggtccgcgggctgtagccaactcttggcagcgctgacagcctataagcaagattccgtctc

SEQ ID NO: 477 - DNA, 2844 bp, Homo sapiens
  misc_feature 2555,2755: n = a,t,g, or c
aaaatcagattccctaaaattttgcactataattgtgcacagcgttctttacctgaaattatttacatgtgccaatgttcttattttcaaagattcttctcctttgaagcttctttattcaacttatttatctcctcaatctttgtcagtaggattctatcctactaatctttattcagttaagatcatactggcgggtcatctctacatggcttcttcttataaagggaacatggatgaaaaatggagttgtgtcacctactcattaataacttgagttcagaaactacactcctgtgtagcataatgaaggaaacaaatatttatcttagtagtaatttacaatggtccagcttccaagattgctactggcatttccttcttactatttcaacaattacagatttattgatgacttttaaattcttactaaatgaattaaactccaggacacaattttaaggtgtctcttataaaagatacataacagcattttggaattaagaataaatcagctaaaattcaattcaacaaatagttattgagcagctattctgctgggtactttctgaggtgttgggagtaaataggaaaacaattttgagaaaatatcttcttttatagagcttaactataaaggatgtttccaaaatttcagtttggcttttctaaagaaatattgatttagatattttattaacgcatttttggttcttaaattccttaggcgtcctttcttttgaagttaccgcaccttaaaaacctggctttatgttttgtgctcaatatcccttggccttatatatcaaatattatggcatgaaatacttatggtttcaaaaaactttacttttattttcattattttggattgttctaggctggtttcatttttggtaatcatgtacattgacaatttctgaacaagcaaaaaaaaatgctctcaaagataagcaagcaacagttgcattccactattgaaggctattacagtatgagttaaatgtactgaacttatttttcttactcctctgtgaaacagtcttaattaactaatgtagtaagcagctttctaaccttcaaaatgattttctgtggtagcaaaatcattttgcaagtcaaatgcaacactagtttatcttttgcatttgaaggactgtttaactattaactggttaattgtgtatcattcccatacagaaggtaagtactcaaattattttcctcataaaacctgacattcagcatcttaaaggtaggtatacatttggtactttcttatgttcactcctatacccactagatcaaaaatataagggactgagtgattttaaaacttaaatgaaaaattttaataaggaaaaagtaatagacaatatcagtatgataaagtgggatctacaccagttatcagagaaacacaaatgtgtacatactgcatgatctgcaaagtgtagccacatataatattttgcataatcatactttataactacgaataaacagatggatttatccatctgtttaaaagctaaagcagatgaaagtaattttagtagcacacaaacagactaaatcatttgttctcataactcttgtctaatttgaagacaatgggaaatatttaaaagtgatttcatagagcctgaaaccactttgacatttgagttgagtcacacccgaatgttgaaataaatgtcctattccggtaaatttaaaggactgttttaacatgataatttgtctcctgaaataatgtcccaggaccccactaacaaaagtcaaaattgaaggtgaacctgaattcagactgattaaagaaggtgaaacaataactgaagtgatccatggagagccaattattaaaaaataccccaaaatcattgatggagtgcctgtggaaataactgaaaaagagacacgagaagaacgaatcattacaggtctgaaatagaatacactaggatttctactggaggtggagaagcagaagaaactttgaagaaattgttacaagaagacacacccatgaggaagttgcaagccagcaaaaaagttcaaggatctagaagacgattaagggaaggtcgttctcagtgaaaatccaaaaaccagaaaaaaatgtttatacaaccctaagtcaataacctgaccttagaaaattgtgagagccaagttgacttcaggaactgaaacatcagcacaaagaagcaatcatcaaataattctgaacacaaatttaatatttttttttctgaatgagaaacatgagggaaattgtggagttagcctcctgtggtaaaggaattgaaggaaatataacaccttacgccctttttcatcatgacattaaaagttctggctaactttggaatccattagagaaaaatccttgtcaccagattcattacaattcaaatcgaagagttgtgaactgttatcccattgaaaagaccgagccttgtatgtatgttatggatacataaaatgcgcgcaagccattatccccccatgggaagctaagttataaaaataggtgcttggtgtacaaaacnttttatatcaaaaggctttgcgcatttctatatgagtgggtttactggtaaattatgttattttttacaactaattttgtacacacagaatgtttgtcacatgcctcttgcaacgcatattttttaatctcaaacgtttcaataaaaccctttttcagatataaagagaattacttcaaacggagcaactcagaaaaacncaagacttaagtcaaaaagcggtttggacttgggaacaggactttatccctcttttcccgaacaagtctcattaaaggaaattgaaatg

SEQ ID NO: 478 - DNA, 2609 bp, Homo sapiens
  misc_feature 995: n = a,t,g, or c
caccaccttttgaagaggcagttcattttctttgcaaagctctctcctaacttcctccgtaaattccagccagcatggccacatgggtcacgcctggtgccttcacacatttgaggggtcttcgtctctttttaaagcttagaggtacaagctcaggacagtcttcagtaaggaaatttgtggatttccctttggatctttcttcctctccagcccacaagtggctctagtgagacgagcatttaagctgcaggtggtggcactcgggtctcagagccaccagacgtgcaggtgggacagtggttccagctccggctgcctgtcagcgtccctcccaggtgctagccctggcaggcacagccctcccctcatgccagcaaaggaaatgctcttgatgagaggctcgctttaaagaagcccaaagcgtgtgcttatccaaggggttcagctattcctgacttcacggcttgcatgtttgatttttctaagagaaaagaggctgcctgctgggtgtctgtggaaatgagattaaaaactgtacaatctcagattttactaaaatgcaaaaatgtagtttcagtttcttaaattataagcacgagtcttctcacgcttgttttctccagtctcttggtgctaaggacttcagtgtggcccagctgccgccacacctcagaggcctgttgatgctgagcacttcttgctgtggggtgcagagcacatgtgggtaggtgcagcccacagaacccacccgtcccctaccctcacccaggcgcctctctctgaagctcctcaggctctaatcccagcttcacttgctacctgtgagcaactggggttccgtttcttcactgagaagtgacgacgctaccagctacaccttgtggcttgccaagagcatccatgtttatgggtggggtgctcagtacaggaaataactgaggcacaggtgttaggattattctttcctgccttaatcccccctcctcactttncctgggagccagctgtgttcccacctgcagctcccagcatcctctagcttgatgccgcgtgctcccagcccctcaccccccctgggcaacgtcaccctgcacagcgcccggatgctcgtttggtcttttcctataatgggctggtcagctctgctgcagctcagccaggaccaaccgggcctgccccttcctggcagtgctggtggggcagccgcagtggaggcctcgccacaccagacaggcctgactgcaagacaaacaaacagatggtcaagagcctctgcaatgcacagcagacagcttttcacagacaccaactccagtgttgctctgagggtgcatcatcatcgaggcagggtcttgctttgtcacccagtggtgtgaacactgctcactgcatcctcaacctcctgggctcaagtgatcctcccgcctcagcctctcgagtagttgggaccacaggggcatgccaccatgcctggctttttttttttttggctgtcacccaggctggagtgcagtggtgcaatctcggctcactgcaacctctgcctcccacgttcaagcgatattctcccacctcagcctcccgagtagctgggattacaggcgcccaccaccatgcccagctaatttttgtagagacgggcgtcatgttggctggctgtctcgaactcctgacctcagtgatccacccgcctggcctcccaaagtgctgggattacaggcgtgagtgccgcacctggcctgtagtcttactggaagagaatatttgatttatgcaacctctctgttacagagcaaagtattatttgttccagatagtctcaaagatgtaaattttatttttagcattatctcttctgagagcttctaatttgtaccttacctgtgactaggaggagtaacaagttcagcctgagaattagttcttgtaataatctttttctttgcataactgcaaaggagacagaaagttttgaggtattctgtctctgacagaatactttcaaacataacatttttctttactttaaagattataaactcctttttactatacttttctggaacatatccctggtgaccagtcctattccagggtgtaggagaagcccctatttagggattgacccagacaacaataattcaggccagagcctctagttgagtagtgagttaagccagtagagaaggaaatgtagaccaaatagttagtgaagaaggcagtggtaatgaatgagacagaggactccatttgaaaagacagtttttcctttttgttatgaaaaatggtcctggtaacaattttgtaataggtaatgtccacgaaccagattttatatggaaatgtgattgacgtatcatttctggggaacttcatgatttgctctgttaagcttactgatttggattaatgaacgtttaaatcagtgttttttaattttattattattatttttaagacagagtcttaccctgttgcccaagctggagtgctgtaccacaattgtagctcattgcaacctcaaattcctgggctcaagtgattctcccatctcagcctcccaagtagctaggactacagatgcgccccaccaccaccttagaaaa

SEQ ID NO: 479 - DNA, 835 bp, Homo sapiens
gaaagaacagaaggagaccagaaactctaggggggagaaagagaatgagagaaagagaatgagagagagagaaacacaaacacagtgacacagtgagagcttagtctccaagagcctattcattgattcaaacacccaagccacaggatacctcagatggccctcttgccagctggaagctctttctccaatgagcaaagttacagtgacctggctggagttacctggtgcacataggaccttaggggaaagttcagcgtggactacacttgctctgggatctgcttttccacatgtgtgtatggcacgcctttttctgctggattgggaaggacaagattttgctgtgctagggagaaatgaaaacggggtgagctgagtagctgggtttctggaggatagaacatcagatggggaggctttccgaggtgaagaatgagagggaaccacttactagagagaaaagagctccaggcctggggaacagcacgtgcgaaggccaggagagaagaactgttgaaacaacgagaagggtggcacggctggagctgagccagcaagggggatcgtgaggagccttggggttggggagatctgcagaagcatcagaccaggcagggcctcgtacgcagtcctgaggagttttacttttattctaagacagttggggagctccaggagctgttttaagttggggagagactggattccagcctgcaaaagctgttttgtgaagactaaaaccagtgaggagaggtggaggtgctttggggacactgaaatggatttagtcttcacaaaacagcttttgcaggctggaatccagtctctcccc

SEQ ID NO: 480 - DNA, 756 bp, Homo sapiens
gccacaatctcaaataacaaaagggaatgttctaaaactttttcttccttaaaaaatggagaaaattgcacttgtgcttgctgtgtggtatataaaccaggattagtcccagggtcgtgaggtttctggtgaaaaggttaaatcgtagaagctagtatattttttatatttttgtaacaattgcttttttcatgggggaggcggggttagtatttatagtcctaacaagtccagtaattttttataaatcttcagattataaacagcccctaaaaactttacaacgtttacacagttttttaaaaaaagagactgtatacacttgatttgctttcaaaataaataaggtcagctagtctaggaggttaacgtcgggtaggaatgctgatcatgataggtttggttttctacagattctgttccggtgcctttcctatccaggcaccacctgagaaagttgtcatttgaggtcgcacttggaagttacatctgtgaagtttctgtcattcgtccagatctgtgtgtgtagcatgtgctgaggaagcacgtgctgggctgtgcctcagacagtgcatcaccgggcacccagaggcttgcctggctattcctgttctggtgtgtgtggagtgttggggaggaacagatgcagatcaacctgtggctgttttcccgtctaggttctcacaggtatctcctgacagaggtacttaacaatggctctgctggaaatttctataaataaaatgtgtaatgagt

SEQ ID NO: 481 - DNA, 2849 bp, Homo sapiens
cggagcggtccctgcaacccggccggcgggaactgccttctagtttttagtctcagaccagaccaccgggcgcaccccgatgccgagcccgcagcttctggtgctcttcggcagccagacaggcacggctcaggatgtgtcggagagactgggtcgcgaggcccggcgccggcggcttggctgccgggtgcaggccctggactcctacccggtggtgaatctgattaacgagcccctggtgatatttgtttgtgcaactacaggccaaggagacccccctgacaacatgaagaacttctggaggtttatattccggaagaacctgccctccactgccctctgtcagatggactttgccgtcctgggctcgggaactcctcatacgccaagtgagtaggggatgggacagtgggcggacggaacagttctgggggtcgagcaacaggtgtgctggcagaggaccgagaccagcttccagggtcggcccctgcgcgcctcagggccctcgcagtggtactggcttctccacaacgctccctggtgggcaccccaggcttcacgctgcggggagggcacagaggggagcaggcagggtggcaaagggctgggctccagccacgctgacgtcacacaggcctacctggcgccggtccccacttttacaaaaaggcgttctgtgaagtgttgacgactttgagcctggaggaggaccccgtatgctcctgccaccccagaggccacctctgccttttctcctgggcattttcacagtgctcctctgcaccctaagcaaggagtggcatgttcagtgtgcaaatggcatctttagaccccacaacggtgaaaaccccgactgtccacgtagggcccaggtccgctgagcaccgagcatcaaaagccgtttgcatagccaggtgtcagtcatttcagatgaaaaagaacgggaagatcggagacagctccccccggttctgccgggaggttttgttccgtgcgtgacgtaggtccgtgcatgacgttgtttcctgcgtgacgttgttctgtgtgggacgcagtgttcgttcaagagagggagggaggccgctgccgacagcgttcccagggaggagcgtgacccagagccagtcatgcctcggaaccagagtgagaagagaaactgacccccgggaagatgcctggctctctccccagcacagagtttctcagctgaggagtgacccacatcttggctgggggcctggaggcctcagctgcctcaggtccctgcccagggatgagggcccatcagtgggacgaggccgcctgctcccacccacacaggctcattctctgcgagcagaggacctgctgcttggcaccctggcagctgccctggtctcggcagcccctggcgtgtggaggccctgccccctcctagggtgcggccagcgtggagtgtgttttccacccgagggaggccctccccaggctccactcttcgcccgggctccactctcccgggttccactctgcctgggcaccactctccgcccgggctccagcccaggaccagcctcactgtctccacaggttcaacttcgtggccaagaagctgcaccgacggctactgcagcttgggggcagcgccctcctgcccgtgtgcctgggcgatgaccagcatgagctggggcccgacgctgctgtggacccctggctgcgagacttgtgggacagggttctggggctgtacccgccgcttccgggcctcactgagatccctcccggagtccccctgccctccaagttcaccctgctgttcctccaagaggcacccagcacgggctctgagggcagcgggtagctcaccccggctctcaggagcccccgtcagagtcgaagcccttcctagcacccatgatctccaaccagagagtcaccggcccctcccacttccaggacgttcggctgattgagtttgacatcttgggctctggcatcaggtggggactgctggggaccgaggagggcaaggtgaggtgggccgtgggtcgggttcggaggaggctgggccgggctgcaggggatgacttctatccggggccccgacatcctccctgcggcgtccccacagccctggtggcttcttccacacagctttgctgctggtgatgtggtgctgattcagccctccaactcggctgcccatgtccagcggttctgccaggtgctgggcctggaccctgaccagctcttcatgctgcagccgcgggagccagatgtctcctcccccacgaggctgccccagccctgctccatgcggcacctcgtgtcccactacctggacatcgccagcgtgcctcgccgctccttcttcgaactcctggcctgtctatccctccatgagctggagcgggagaagctgctggagttcagttctgcccaaggccaggaggagctctttgaatactgcaaccggccccgcaggaccatcctggaggtgagatgggagggcggcaggcccagcccctgagctacagccacgctgcagccaccctgagactctctttgcctaggtgctctgtgacttcccgcacacagctgccgccatccctcccgactacctgttggacctcatccccgttatccggccgagggccttctccatcgcctcctcgctgctggtgaggggcctggtggttggagcccaggaccggccctgggaaagctgggaccggggctgtggggttttgtaagcaggggctgccctctgaccaggtgacgttcccccagtcggactgcctctgcgggaggtaggtggggcccacggcccaggcacaggtgagggcagccttgttccaccaccacgaaac

SEQ ID NO: 482 - DNA, 3310 bp, Homo sapiens
gcttgtccccatgtaacagatgagacattgaggctcagagaggttaaataacgtgtccaacgtcaatcagtaagcatgtggcagagatggactccacacccctgtcatcctggtcctaagacctaggagctttctggtataagatgctgccttttggggaagactgtgaaaacctgagttccctcagggatgaaactaaatcaggatacttcttctatcaagacccagtggcctgcatctggggaaatcttaattccacggttggatgtcctggaagtttctggaactggctgatcataaaatgggtccaggaagattcgatagtgttattttttcctacccctttctctctcctgcttccagagtcattgataggctggtcttattgagttacatcttcccaaaaattcagggacagttcccatgtggagtctgaaggtggagttacaaattccattcatagccctgctttacaacgctagtgtgcaatgcaaagaacgctgggcttggagatctggattccagtcctgcttcactaccaactccctgtgtggtcttaggggagtcacttcgattctctgagcctcagtttctttatcaataaaatggggataatcaaatccatatttagacagtcactgtgacaacacggcagataaatggcttctgtacctcatgttctatgcagaaaaaaaagatatggccactcttctcacctatagggggatttgtactctgccccctgtaacatagtgggaagagaggaatccccctaaggaagctctcactgaaggacaaatcattttctttctttctttttcttttttttttttgagacagagtgttgctctgtcgcccaggctggagtacagctgcgtgatctcaactcactgcaacctccacctcctgagttcaagtgattttcatgcctttgcctcctaagtagctgagactataagtatgcaccaccatacttggctaacttttgtattttcagtagagatgaggtttttccatgttggccaggctggtctcaaactgctggcctccagtgatcctcctgccttagcctcccaaagtgcagaaattacaggcatgaggcatcactcccgaccaggacagacttttctagtagcctcacagcctctgtgtggttttcttcatcaccctttctctaaagttttggctaaggctatgcagtgttggtcttgaccacactgccctgacaggaggtgaagttatgtctgatttttaagttggctgtgtgtcttccaattggctgatcatgtgccaaaagtgccataaaacaaaaagaactcaccatcttttcaggtagaaaagaaaaccctatacatttgaaccccacaatggagaatttgtgatcactggatttatctacattatgaaaaaaagggcagcttatcaaattaagataaaaaaattcagtttcaatgtaacttctgaacattttaaaacacaattacgagtcatgcctatgttttcattaaactagggacactttctggaaaatactttcccttttagagttcagatctgtggatgcacttgaacccaagcttctttatgacagtctgtaaaccaggcccagttcaggctggcctccctgagagggatgttttttccccctctttcaggagagccaacaaattgtttctgaaatgcattaggtctttggttgaaactgtcagaaaggaagatgaaaatctcggaggtgtttgggtgagtgtatagcttcagcctaattcggtatgagagccaaggacagcactcggatggtaccctcgagggcagaatcactggctggtaaagtttgatcaaaactacagtgtcctgaagggtattaagatgcttcagaaatctcaagcatcgttaaggtgcttgagaaagagttgcccaaagaagaaagtcagaaccaggggaagcaattcttctgcaatgcactaaatatccagcaggtggcaacagcttccttttacattctcccaagaccattggcatacaaacaggaagtaaacattgccgggtttaggaatgatcaacaatgaggttttctgttctccctcttgtcccccgcttttttttttttttttttttttttttttttttgctgtgccaactctccctaacttaactacattctgagctagcagcagcatccagacaaaacacaagcaaggactccaagtacacaggggttaacacactccttcatcacctaggagagccagatatttataaattctgctccagtctcagccagccactgggagaatcatgcctagtaacttcctccaaccagcatcccaccattagtacctacagcagcagacactttgaccaagaactgcctgcaggagctaggaaaaacagctttttgcaaaacaagcgtcaggactattaagtatgagataattgttaggggaaatatgaccagctctcgcatcttttaatatacctaatgctttatctgtatcgatctgcttctgctaaggaggaaattcagagtttatctacctgtctgtgcaatcaagtgtgttgctggacctattggcaaattacaggaaccccactgggatcttgccttttagattctaatttccgcacccatggcaaacttgaataatcagcaaagttaatcaacattttacctcccaggtgctgtgcatgtccaatatcctgaaatttgaacggcaagcaggcaacaggaattcccaactctagtagggaggatgctcaatatcagagatccattagagcaaatcatttcagagtcagggagaggggacatgaatgtcttgaggccataagacatcattaaagttagaaagacaacgtgacaaagcaatttaaaaagctacacaagcgacccagtcctaatgccagctagggcaagggaagggctcttcagagatgctttacaaacccacttactcatagaaagtcgtccatcctgtttcatcgctcttggtggccaggagcccagtgttgccatcataggtcatgagaccaagctccaggttctgtgtggacacgactttgaggcctccgttggtgcccacggtgagggtgatgatctggttgtcaggcatgagcaggtgacggggcatgccactgctgtcccgacggatcttcagggaattcccattattgtcaatcaattcagtgacatcattgtcagtactatatgtgaaattgtacaagtactcccctgtcaccaggctcacagtgtattggtggatgccatcagcgttgaaaacatataactcctgctctccggggtaaaatcttt

SEQ ID NO: 483 - DNA, 2649 bp, Homo sapiens
ggcagacttactcggctatacacagtcctgcctcacccccttccatcttagggttgcctgggacataggggaatggcaagctgctcccatggcgcaggcctccgtgctgggatgctgggcatccacagagcctgaaggatcgcctgggctgggcaggggtttgattggagggtctggaccacccccaatcctttcagctcccattctcagcctgattctgagaccaagaccaaaacctcagggcaaagcctcagccagtcctggcgtggccctaagcagacctgagatctgtgcgaggaagtaggcagccacttccatggggctaaaaattagggccgtagacaggctcctggccaccttcaccaggtgggcagccttggaaaggagcccagtggtccccactccgtcccgatgtctccacacccagcccctgagcccatctcagcaggtcctgaacaaagatgaggttacagcctagaggtaccagggcttcatctggggcatggccagcacagggacagcagctgaatatccttgggataataatgacaattatattgctcacatttattgagcaggtctctatgctacttctatgccgaatactttttatagcagcatctcatttaatcaccacaataacctgatgagacaggaagtattattaccccatttttctttttctttctttctttttttatttttattttttttatttttgagatggagtctcgctctgtcacccaggctggagtgcagtggggcgatcttggctcactgcaacctccacctgccaggttcaagcaattctcccacttcagcctccagagcaactgggactacaggcatgcgtcaccacgcctagctaatttttgtatttttagtagagacggggtttcaccatgttgggcaggctggtctgaactcctgacctcaagtgattcgtcagcctcagcctcccaaagtcccgggattacaggcgtgagccactgtgcccccacctatccccatttttcaaatgagatgactgaggttcaaagtagttcagtacctgccccaaagccacaaagcctgtgctactctgcccccaagaattagtgatttccaggctgtgcctggctctgctagctagcagctgtgtgaccttggcaagtccgtttgcctctctgagcctatctacctcctctgtataatgggtctggtagtcttcacctacctcaccagctgctgtggagctccgacgagatggtgactgtgaaagcacttgacaaactgaaggcactggacatgccttgtggtcagtgtggcctcaacccagatgtccagtgatttccagggcacaggggctttgagtgggatggccaaagaagacacctccatccaactgggagccacccctgggtcacaaacactccattgcttggtccctcacagtagctcgaggtcagaagttgactgcagcttgattcacagcccctcgctcagagcagggaggtgggactggcagcacagcaaagacatcgctccttgggggcctccctgttgcatatttcaattaaggcaggtttacagccccccagcgtctgtccggagggggcctgagcagcaggcctggcagcacccactgctcctgcctgaagaggtgctatccagccccggctgtggacatacagtgagattgtacaggccggtctggagcagctgcaggggatatgatctggataagactgagcagacctaggaggctctgcaatgtagagcttattcctcaagctcatggtgagattggagccctaaagagttagccagggtgcagccaccagtgtggaaatccagggatggcgcaggccatggccagctcttcccagctcacgtctgagaaccaagggtctgagcctctctatcagccccaggaaatcctcagccatttggtgctgatcagcgatagggctctggttcacaggatgagtgccaggggctcctctggggagaggggccagctgcattccgccccaccctgagagtgagaagggggcagtccccgaccaggaatgggcctacctggtgctaagaatggacataacagttctccctctgaggcttgcatttcatctgtcatggcaagagcactttcaggctcacagtttctcatcttttcaacagtcagggaaaagaaacctatggaatagttcgcatttcacagaggaagaaactgagggccagagctaggggtctctgacacagccatgggatcctgcaccccacactggctctatgtgactctgtagtagtggctaatgtccatcagtcgccccctgctcccctgcctggccatttgcccccaaatagggcagtggtgggagtatatcctggaggagggggaagtgggatataggtagtacttggctgacttcacaattttgctacacccagtctggacctcctgacagtggagtgggatccctgtggcttcctttttcttgtttttgttttgttttgttttttttagatggagtctccctctatcatccaggctggagtgcaatggtgcgatttcagctcactgcaacttccacctcccaggttcaaacaattctcctgtctcagccacctgagtagcttggactacaggcacccaccaccacgaac

SEQ ID NO: 484 - DNA, 2125 bp, Homo sapiens
ctgaagcaggaaaataaaagaatgaagcaatgcctggaagaagaactgaaatcaagaagggacctagaaaagctggtgcggaggcttttgaagcaaacagatgagtgtattcgaggcgagtccagtagcaagacctcaattcttccataaccatcactgtgccactgggtggagtgtgccttcagggcatcttgaaatgtcccgctgaatgatttgactcagtttgctcacttctttggcttttgttttgtgtttgagtctctctctctctctccctctctcttctctttctctccccgctgtgtgcatatgtgtgtgcgtgcacgtgcgcgcttgggcatttgctgttgtttggttattggttggttgttcattttttttttcaacaggtgaaaaagcaggaagtggtggtagagatggcctcagagtcttttccattcagtaagaaagagaaagggaatgcaggccagttacttaaaaggtcttcagattgccttcagttcacagtgcctctgcaacagccattgccctcaggtcacattctttgggctggctgcccttgcaaagcagctggccaaggcttattaaatgtgaacccaacttttccccagggctttcctgtacctgcaagcctcttagtacttaatttaccgaagcaaatcttccagactatggcttgagtaggatgaaagacaaacacatctgcccaatgatccagctgcccttccttagaccatcacatgcctcccctcaatcacaggttttaaaattactgccctatgttgtctataagaccaagaaaactgtagtacccttattccttttgtgtcatgtaaattgtaactcaggggggcagaagctctggtcacccacaccaacaccaaatccatcagcaaattctactggacaatcctcccttttagtagcagagttgaccgccttttcccattgcatgataggtttctttccctcattctgcctagtgtgtaagttttctatttccccagtacttttagccaaccttaccaagtggtgtgtaaactagtatgtatgtgctttgcttactttttaaaaaaatgtagttagactgtgaggagttactttatgtacgttgcatattcaaactgtgatgttttatccttcaaaacaatctgcattaagaagatattgtgccctactagacagctttcattcactttattactctctcatatatgctgtgagaagttgtaatattaattggcctctttgggtgggactctaagcagtatttgcagaaatatgcttctggtccaacttgtacatccagaacaaaagggcccctctagtagctgtgtgctggattattcaggactgattaactcaagttgctcattgaatcacatcatccactttatcccagaaactagaactgtgagaaaccaggtttagaagacagtcacagaacagcacacatccaaattcagcgccattgaaagttggcctaaggctcagtgccactcacccctccctccccaaaagacaagagaaatttggccagatggggaaggtcactggaaattgaggccaaagggctgatcagaattgcctttataatatatttgatggatgcctataaatgtgggttttgcaaatattgtttaaaaaccaaacttgaagccaggcatggtggcccacacctgtggtcccagctactcaggaggctgaggtgggaggatcatttgagcccaggaggtcaaggctgcagtgagctgtgatgacaccactgcactccaacctaggtaacagagagacacctctgtctctgaaaaaacaaaacttgaagtttgaaacccccagcttgctgaggagccctttttatttttggtactgagagtctcaaggtcccatagctacatggtacagggctgttgtctgcttgctgcacagcagaaattacaccatccacaggaaatggactatttttgcagtccaacatcagccaaccacacacagccgtgtttggaagctgaagagtaaagaaatttctaggaatggctgttgttctgttttttagcacagccatttagatataacatccttcacttaaaaattaaaaacatcagtactaccaccaccacgaaac

SEQ ID NO: 485 - DNA, 1948 bp, Homo sapiens
agaaaatacatgtcttctggagatgacttttggaaatggagttgttaagacggcctctggaagcgatacgtccacgtttgttaagtgggttagatgacatggagctggaagacctgagaaggaagagaagaaggttctatgctagactggtcatatttagaagacattttcatattctatccattgttttgtgtgcattttattcctcactactgtgtatatagttgacaatgctaagcttttttgaaatgtctcttctttttagatgttctgaagtgcctgatatgttaaaattagaggtagcaaaatcacattttgtaaatatctttttgttacaattcataggaaatatttttgggggggaatggccaaatcacctgttgagtaatactcattgtgtttgtgcagtggttcaggggaggagagaggagggggaggtgcagagagctctatgccatcctgtttacagcgaggcaagatgaatcattatgtctgtgcattttgttttacttatctgtgtatatagtgtacataaaggacagacgagtcctaattgacaacatctagtctttctggatgttaaagaggttgccagtgtatgacaaaagtagagttagtaaactaatatattttgtacattttgttttacaagtcctaggaaagattgtcttctgaaaatttgatgtcttctgggttgatggagatgggaaggggtctaggccagaatgttcacatttggaagactctttcaaattataactgttgttacatgtttgcagtttattcaagactgctgtatacatagtagacaaattaactccttacttgaaacatctagtctatctagatgtttagaagtgcccgatgtatgttaaatgtataggtagtaaaataccactttgtaaatatctttttgctaaaattcataggaaatgcttttggaaattgaattgtgaagccacctttgtgaacagtatagtaatgtctatacttgttcaatagtttagaggaggtaggagggaagaaattgcaaaaggtaatattactagtgtgttcatacttggacattttcagacaccatttttctatatgttttgtgcattttgttttgctctgtatatagtatatataatggacaaatagtcctaatttttcaacatctagtctctagatgttaaagaggttgccagtgtatgacaaaggagtaaaattagcatattttgtacactttgtgttgaaattcgtaggaaaacttgtcttctgtaaagacttttgcataggaatttgtttgaccatctctaagcattacacgtgcctgtacttgtccactggattgaaggcagagaaggaagggaggagggaatgattcaaggccaaaatggccacatttagaagatacctcagatgataaccattgttatgtgtgtgcaattttatttaacagtgctgtgtatgtggtggacaagttatatgaaatatctagtctttctagatatttggaagtgcttgatgtatttaaaagtggtagtagaataacactttgtaaatagcttttaaaaactgatgggaaatgctgtttggaagtggaattgttgaaccacctgggaggtgggagggaagaaattgcaaatggtgttttgccattgtttattagaaaatttcagcttaatccattgtatatatgttacatgcatttcatttaactttgctatactgtatatattgtatatataacggacaaattagtcccgattttataatatctagtctctagatattaaagaggttgccaatgtatgacagaagtagagttagtaaactaacacattttgtacactttgttaaaatttgtagaaaggctgtcttctgaaaaggacttttggaagtgagataacatcagctctaagtgacacgtgcctatatccatcaggttggtggcggcaaggct

SEQ ID NO: 486 - DNA, 3364 bp, Homo sapiens
gttgggtgcaggcaggtgccatgggcccgcttgaggcacactgaggggacgcggggctgggccatggccggcgctcgggccgccgccgccgctgcctcggcggggtcctcggcctcttcaggcaaccagccgcctcaggagctggggcttggggagctgctggaggagttctcccggactcagtaccgggccaaggatggcagcgggaccggcggctctaaggttgagcgcattgagaagagatgtctggagctgtttggccgagactactgtttcagcgtgattccaaacacgaatggggatatctgtggccactatccccggcacatcgtgttcctggagtatgagagttctgagaaggagaaagacacgtttgagagtaccgtacaggtgagcaagttgcaagacctcatccaccgcagcaagatggcccggtgcagaggacggtttgtctgcccagtaatcctgttcaagggcaagggggtgcagatgatgcctgggcagatgtggaggacgtcacggaggaggactgtgctcttcgaagtggtgacacgcatctttttgataaggtcagaggctatgacatcaagctgcttcgatacctgtcagtcaaatacatctgtgacctgatggtggagaacaagaaggtgaagtttggcatgaatgtaacctcctctgagaaggtggacaaagcccagcgctatgccgacttcactctcctctccatcccgtatccaggctgtgaatttttcaaggaatataaagatcgggattacatggcagaagggctcatatttaactggaagcaggactacgttgatgccccattgagcatccccgacttcctgactcactctctgaacattgactggagccagtatcagtgttgggatctggtgcaacaaacacaaaactacctgaagctgctgctttccttagttaacagtgatggtgagtctgtctcctccagagccctcgagccactgcacccttggggagttcccagttcattctgcctcaactgtatgtttgttggagttgcacaccttacttttgtgctgtgggagaggaatttggggagttcctagaatcccagaggctgggtgggatttgtccattggtggctttattccatgtcctcaaaatcctagaaaacaaaattaagaactccttaccatctatgccgtgcacagggtattttcacactgtctcagcattgcacaacagcattgtgtgtggggccaggatgggcctctcattcagaaagatgaggcatgagatgagagaatcaatccgggctgctcagtggatgcacacagcctgtagaggccctgttctccagagtcctccacccagtttggctgttttgattggatgggcctggcttgctcaatgtctctagggcagacggactctaaatccctggtagcaatcaggacttctgtaggagttgcacttgctcaaacaagtggaaatgcattggcttatggaaccaagaaggcccaagaacagagccaggtgaacatcataaagaatctttctctgtttctcaaaaccactgtcttggcctcatggctggcagccattccagacctgtctcccgccatcttagctcccccaggggagactacctcagtctctggagttccagtaaaggtctgagcttatgctcattggcccagtttgggttaagtgcccatccttgaactagtcgctggagggagatttgccacaaagtcgcatgccagcccctggagccaggcactggttctctagctgcgggcattagcacccctcaaagcacttctggaaacgtgtgtctggcatgttaggtgctgcagaaactagagggtggggaaggtagtactagcatgtggttagagttggccagggatagtcagtgtcctgcaattcatgcagccctgcacactgaaaaattgcccactcccgctaccccccaaaaaatacttgtcgtgccctctgagaaactgggtagggatgtcatccctgcctaaatgacctgggcaaagtggactgtgtaggctgcactgtgtccccagaagtacactgagaactatagtcagaaggaagaaaggaagctacaaagccagacgcctgccactcacccctttctgggactaggctggagaagagccatggggaggccactggggaagacagaagctggtggggcctggctccctccaccaggccaagctggtggtacttcctgctcatcggcccatgtctggttctctcctgggcatcctctcctgcggttcctgagtagatgacagcgggctgctggtacactgtatctcaggctgggatcggacccccctcttcatctccctcctgcgcctttccttgtgggctgatgggctcatccacacgtccctgaagcccactgagatcctctacctcactgtggcctatgactggttcctcttcgggcacatgttggtagatcggctcagcaaaggggaggagattttcttcttctgcttcaattttttgaagcatattacctccgaggagttctctgctctgaagacccagaggaggaagagtttgccagcccgggatggaggcttcaccctggaagacatctgcatgctgagacgaaaggaccgtggcagcaccaccagccttggcagcgacttctccctggtcatggagagttccccaggagccactgggagcttcacctatgaggccgtggagctggtcccagcaggagcgccaactcaggcagcttggaggaagagccactcatcctctccacagagtgtcctctggaaccggccacaaccctcagaggaccgcttgccttcccagcaggggctggcggaagccaggtcttccagctcctcttcctcaaaccattctgataactttttcaggatgggtagcagtcccctggaggtccccaaacccaggcttgcagccctgagtgatcgagagactcggctgcaggaggtgcgctcagccttcttggctgcgtacagcagcacagtggggcttcgggcagtagcccccagtccttccggtgccatcgggggcctgctggagcaatttgcccgtggtgttggactccggagcatcagcagcaatgccttgtgaagaagccagcccatgacattttcctgctcctctctcagctgagcccttagcagagaatcaaagccatgcctggccgaaggggtacttccaggtcaggggaaatttcagtcccccatctccatcatgaacatggcagccccaaagctgagcaaggccaaagacagggttttccaacccccagcctcttgactggtgaccaccaccccttcttgtcactgtctcccacccaccaccacgaaac

SEQ ID NO: 487 - DNA, 801 bp, Homo sapiens
cagttccacatgtacctatgggcccttgggatggggcccagggcctcaacatgctccattctggtctactgttcccccacctcctttgcctccagcctccattgggagagctgttccccaacctaaaatggagtctaggggcgctccagctggccctcctgaaaatgtacttcccttgtcgatggctcctcccctcagtcttgggctacctggccatggagctcctcagacagagcctaccaaggtggaggtcaagccagtgcctgcatctccccatccgaaacacaaggtgtctgccctggtgcaaagtccccagatgaaggctctagcatgtgtgtctgctgaaggtgtgactgttgaggagcctgcatcagagaggctaaagcctgagacccaagagaccaggcccagggagaagccccccttgcctgctaccaaggctgttcccacaccaaggcagagcactgtccccaagctgcctgctgtccacccagcccgtctaaggaagctgtccttcctgcctaccccacgtactcagggttctgaagatgtggtacaggctttcatcagtgagattggaattgaggcatcggacctgtccagtctgctggagcagtttgagaaatcagaagccaaaaaggagtgtcctcctccggctcctgctgacagcttggctgtaggaaactcaggcggcgttgacattccccaggagaagaggcccctagaccggttacaagccccagaactggccaacgtggcagggctcacccctccagctacccctccccaccaccacgaaac

SEQ ID NO: 488 - DNA, 1593 bp, Homo sapiens
agcaagactctctcaaaaaaaaaaaaaaagaaagaaagaaatcagaaaatcgaccacagtggtagccacctggcctaatgctgtgtttttgtacctgacaggggtcactcattttaggcacaactccttcattctttgtgaaattagtgagtttccttctacccgtcaccagattcaatatgttctattaatacaccgataaccacaggggaagggcacttgtcgctctcccacctggttaccacagtctccatgggtcttttgccgtgaccacaaataaaggaaacactcatcactagtatctaagtcgggctttacagtaactatgcaccttctgtgtgcttcacctcactctctacttcaaacagcccatggagggaggtattattatactccttatgttgacagtgaagaatctgaggcccagagaggttggggacttgagtaaagtcacacagccctgagaggcaggaccagggttccattcctgctctatccagttccaagcccttgtgttttccattatgtttagtgcctctttgctaacagcaacatctgcaagatttgtgttggttttgatggagaactctagctcatccacatgctagtgcccaagtggtggaggggccacctcagcaggtgggttctgaatgcagccaaggctgtccccgcaatgggtgagactcgctccaactgcccgccctcagagcaggtgcctaagtcctccctggcactggcaggccttacctcacattgctaaattaaagcaatgcaattcctcttgggtaagaggaattcctccttctttactaactgatccccagcaaggaaataaaatgttaggctttaaaaatccctactttgtcatatcagactatattctaaaactatatttgagcgaaacctgtcattgcgtctaatttcaaatatacagaatctccttaagagctgttgccttatttttttgtaaagcctctctgacatcaaatggggagaaatggtggcacctccagacaccctgaaactacacaccatttcttccctgctcagcttctgctcaggagttctgtgagctatgggaaggccattggttggatttgctacttttactttcatcttcctctgctgtagagccatttaatgttattgtcatatgctgctggtgaggtaaaggtgggtccgggtgccttcccaggggttagaggatgttcaaagggccgatttcagcaggagttcagagggcttatgatggatggtgagagatttgacaaccaccagagcacatgtgctctgaccctctcctgggcattggttcctgctggtaccgggcggttcagaccttcaaataggttgctttcaaaagagctttcaggcacttattgagaattaatgtttaaacagacataatagcctagatgaactcccaagagatctattaaatcttgtgggctgaataaatatctcgtgcaggactgtgcaacagtagcccagagcatcctgcctgtgggcatccacctcccaggtgagggcagtgggaagctggcccgacggcagccagaacttgtttctcacctcccaccagcaacccccaaa

SEQ ID NO: 489 - DNA, 3123 bp, Homo sapiens
ggcggcggcggcggtggttactatggcggagtcggccggagcctcctccttcttcccccttgttgtcctcctgctcgccggcagcggcgggtccgggccccggggggtccaggctctgctgtgtgcgtgcaccagctgcctccaggccaactacacgtgtgagacagatggggcctgcatggtttccattttcaatctggatgggatggagcaccatgtgcgcacctgcatccccaaagtggagctggtccctgccgggaagcccttctactgcctgagctcggaggacctgcgcaacacccactgctgctacactgactactgcaacaggatcgacttgagggtgcccagtggtcacctcaaggagcctgagcacccgtccatgtggggcccggtggagctggtaggcatcatcgccggcccggtgttcctcctgttcctcatcatcatcattgttttccttgtcattaactatcatcagcgtgtctatcacaaccgccagagactggacatggaagatccctcatgtgagatgtgtctctccaaagacaagacgctccaggatcttgtctacgatctctccacctcagggtctggctcagggttacccctctttgtccagcgcacagtggcccgaaccatcgttttacaagagattattggcaagggtcggtttggggaagtatggcggggccgctggaggggtggtgatgtggctgtgaaaatattctcttctcgtgaagaacggtcttggttcagggaagcagagatataccagacggtcatgctgcgccatgaaaacatccttggatttattgctgctgacaataaagataatggcacctggacacagctgtggcttgtttctgactatcatgagcacgggtccctgtttgattatctgaaccggtacacagtgacaattgaggggatgattaagctggccttgtctgctgctagtgggctggcacacctgcacatggagatcgtgggcacccaagggaagcctggaattgctcatcgagacttaaagtcaaagaacattctggtgaagaaaaatggcatgtgtgccatagcagacctgggcctggctgtccgtcatgatgcagtcactgacaccattgacattgccccgaatcagagggtggggaccaaacgatacatggcccctgaagtacttgatgaaaccattaatatgaaacactttgactcctttaaatgtgctgatatttatgccctcgggcttgtatattgggagattgctcgaagatgcaattctggaggagtccatgaagaatatcagctgccatattacgacttagtgccctctgacccttccattgaggaaatgcgaaaggttgtatgtgatcagaagctgcgtcccaacatccccaactggtggcagagttatgaggcactgcgggtgatggggaagatgatgcgagagtgttggtatgccaacggcgcagcccgcctgacggccctgcgcatcaagaagaccctctcccagctcagcgtgcaggaagacgtgaagatctaactgctccctctctccacacggagctcctggcagcgagaactacgcacagctgccgcgttgagcgtacgatggaggcctacctctcgtttctgcccagccctctgtggccaggagccctggcccgcaagagggacagagcccgggagagactcgctcactcccatgttgggtttgagacagacaccttttctatttacctcctaatggcatggagactctgagagcgaattgtgtggagaactcagtgccacacctcgaactggttgtagtgggaagtcccgcgaaacccggtgcatctggcacgtggccaggagccatgacaggggcgcttgggaggggccggaggaaccgaggtgttgccagtgctaagctgccctgagggtttccttcggggaccagcccacagcacaccaaggtggcccggaagaaccagaagtgcagcccctctcacaggcagctctgagccgcgctttcccctcctccctgggatggacgctgccgggagactgccagtggagacggaatctgccgctttgtctgtccagccgtgtgtgcatgtgccgaggtgcgtcccccgttgtgcctggttcgtgccatgcccttacacgtgcgtgtgagtgtgtgtgtgtgtctgtaggtgcgcacttacctgcttgagctttctgtgcatgtgcaggtcgggggtgtggtcgtcatgctgtccgtgcttgctggtgcctcttttcagtagtgagcagcatctagtttccctggtgcccttccctggaggtctctccctcccccagagcccctcatgccacagtggtactctgtgtctggcaggctactctgcccaccccagcatcagcacagctctcctcctccatctcagactgtggaaccaaagctggcccagttgtccatgacaaaagaggcttttgggccaaaatgtaggggggggtggatgggatgggcagggaaggaatcctggtggaagtcttgggtgttagtgtcagccatgggaaatgagccagcccaagggcatcatcctcagcagcatcgaggaagggccgaggaatgtgaagccagatctcgggactcagattggaatgttacatctgtctttcatctcccagatcctggaaacagcagtgtatatttttggtggtggtgggtttggggtggggaagggaagggcgggcaaggagtggggagggagtctggggtgggagggaggcatctgcatgggtcttcttttactggactgtctgatcagggtggagggaaggtgagaggtttgcatccacttcaggagccctactgaagggaacagcctgagccgaacatgttatttaacctgagtatagtatttaacgaagcctagaagcacggctgtgggtggtgatttggtcagcatatcttaggtatataataactttgaagccataacttttaactggagtggtttgatttctttttttaattttattgggagggtttggattttaactttttttaatgttgttaaatattaagtttttgtaaaaggaaaaccatctctgtgattacctctcaatctatttgtttttaaaaaaatcccccct

SEQ ID NO: 490 - DNA, 571 bp, Homo sapiens
gtcctgggtttgaaggtggtggaggagccacaatgtttgtcgtttctacaatttctccattgtaaaagaaaaactgacactgctgaatgaatgtttcaacaacagattgatgaatcttagtagtagacagaaactctcgattttcaaaatcaggtctcatcaaggttggccaaaaacagatggataagttgtctgctgtcattaggttgattttatgttgctgactaaccctgtttagatgtgttatcacgtatctgaatacatcatagtttacaggatgaaatttcttaacaatttctttcaaggcatgaagacgttctgttttatccgggatttttgctgcttccaatagttctggatgaagagaatatggaattaaaggatctggcagatctgcaaagaaagctttaagggctccagctacagcatttactgttacttccattgacactagattgatattatgatcttgatcaaactgcttttgaatattgtcttggtcagttttattcccgctgacacggtagagtccttcggtacataaccctgtatcttcaaaaaattccccccc

SEQ ID NO: 491 - DNA, 1564 bp, Homo sapiens
ctttgcagagtcaacagcccatcagcccatgttttagaggggacactttggtcctcggttcccaccctcagcaagcaggcctccagcccgaggaaggcctctgccgtagtgacgttgccgtgtggggctgcgtggctgttccccttggctggagcattcagccaaccccagcgtcccccctgaggcgttcattggcagccccctaggactgcacgctggccccacggtaaccccccctcccccaccaacatcctgcagggatggggtcagtggttccaccttcacaggccactttgaagggtggattctttgaggccctgccagtcggctccctgctcagctgctggcccgggcgacctgggactcagcaccaacggctgaagtttctcagctgggctctgacctggggtctggggcagggaacgaacatggtggctttgggctgagaggatgagggaggtctttcccaggtcaattactttcctttggctctgcctgaggctcgatttgcctctctggtccaatgggactgacactgttgtacaacctgacctgtggctgagggtgtctgggcttaagcatgtggaccccttcggtgtgtctggcattcgtccatcgtcctgccctttggccttttggtgtgaagccacaggtgtggcttctggccttagcagatggtatgcttgcggaccgcagcccagcatgcgggtgggcccacagcccgagccagcccagagctgccggaagggccgcccttcccggccctggcggggtgctggacactggccattttcactagagtttgcctggcagggaccgatctctgccccctcctctccccaggcctctggctgcagtgatgccgcagaatcctgagccaggtgcctcctgagcagcccgtgcgcctctccacagcggcgtttgccacccaatgcggctcgcttcagatgctctgatgcagagggcatgcccatagtccctctgcagagcctcgcactggggccagggctggcaccagccccaggcggccattctgccacggcctgtcatcttcctcgtagcgtctgctcctcacttggtgtggatggagacttaggagaatgttccgattttccatgatctaagcaggccacgtttaaaataacatcaaggcaagcgtacgtgtcaccctctgtacagacatctcctcccctgaaatgcttttcagtttgacagcccgtttcctagacaagtgcacctggggtttcaggaactttgtgttttttcggagggggttggtggggaggtcgggatgcctgggatcccttcctggagaggcaggctgtctctggaaaaagcctccattgcccacccgccaggcggaaagtcaccctgttcccagcgcggtttcagcatttaattttaagggagctaaggaagcgcggcgcgccccctggtggtggtaagccgccaacgcacctgggggctgcaaccccaccggacgggtggtccggagggaggctggagcggggaggcgaggagggggctgtgagtcctcagaggccctgggccaccaccacgaaac

SEQ ID NO: 492 - DNA, 786 bp, Homo sapiens
gtgcaggacatcaaggatctgtgtctgtctggaacggagacctcagacccagccagagctgcccaggcaggggtggatcagaaatgggcttcttcttgccccatgccacgaaccagccctgtggggatggtgggcccctggaggcttttgggtgagccccaagcctgggagccaacgctgagtccacgtagtgtgcaggtactgctcaggctgcccgcatcagttgcaggaggggtgtggccaccaccagagctgtgctgtggggaggaggcagggctgggtgggaaagcggagcttgcagcacctgggatgcaccggttcagccctgccgttcccagccccagctgtgcaccattctgcagagcgggtttctgtggttcccagtcttgtccctccggctcctcattggagccttcagcttctcgtcgtgccctcctcccacgtagctctctagcctggcccttggcacccaggatcagcgtagggggtgaggaagggtggacagtgtgcctgcaatgtgcctgtcttagtgaccagcgggttctccagcagaaccggcagatgaagcacatctcagctgagcagaaaaggcgcttcaacatcaagatgtgcttcgacatgctcaacagcctcatctccaacaattccaagctgaccagtcacgccatcacactgcagaagaccgtggagtacatcaccaagctgcagcaggagagaggccagatgcaggaggaggcccggcggctgcgggaggagatcgaggagctcaatgccaccaccacgaac

SEQ ID NO: 493 - DNA, 593 bp, Homo sapiens
ggtacaggcaggggcaggcaggaccaccagcagggggctgcctctgcaccctacccgcccaaggagactccaccctggggtcccaaacgccgctaacgcccagacgcatggatgcaccccctaccctgcctccatctatgggagttctttctctcagagtgggggcagtttctggcccaggggtctgagctgcggcagccccagggcagggggccctacctcctcagctctgtgcttggatacagggagcagccaggagactccctagtgcccccaccatggcgggtgtcactcacgcactccccatcccttagggcttcctggcctactgcatccttgtgggagtcagggaggagggcccgttgggtagctggggccaggcttctctccccaccacctgcagatttcttgctgcttccactgatacccttttgactggaatgaactggctgggcttgtcagggggcaccccaaagagggggcactgccaggtagctgggggagtggcatggggcaggggcccagttctcagcagcagacactctgtacagttttttcaatccctgtttttgaataaatattctcagcgcccc

SEQ ID NO: 494 - DNA, 1262 bp, Homo sapiens
attattagacctttagattaatttattagaagttggatttctggtgaaagggtttgagtgtttttgaggctttggcacagaatacccagctggtcccagaaaggtggttcccatttacctgcccgaaggtaattcacccttactgatactgagtactgttttctaaaagaacattaaaaattggataggttaaaaacaggtgaatacatttttttagttgcatttttttggttacccgtgagagtgaacatgttgccatgtgtttgctgacctcctaaatggtctatttgctcctacctttgtaccccaaaagtctgctctcaagatggtagccagaatgatcctttttgagacataagtcaaaatttcactcttctccttaaagctctgcaatggttctcaggttaaaagccaaagtcctgttcaaggcctccagggtcctcaccacttggtcccttgctctttctgttctagccaacttggccttctcctgcccctccgccgcaccatggcaatttcccctgctctgtgtggtcaactacctgaatctgttcaaagctttgctcaaatgtctccttcctgatgagacctccccagcccctgagctccccatgcctcactcctgatcgccttacttaacccttctttttcttttttgccagtagtacttatcaccgtctaaaatacttcataatttacttgtttattgtttgcccctctccaatagaatgtaagctccttggggcagggacctttgtcctttgtcttgttcactgctgtgtcccatgtgtaaacttgtctggcacagaagaggtgctcgataaatatttgttgagtgaatgaatggtaaattttctgttcatattcttttgactattttctattgtaatgttcatctttttagtattggtttataagatgtatatttagcaccttttcatatatcactctttgtcacatattatgcaactaatttgtcatttccatcaatttttaaaatactttcttgatgcttcatttttaagctgtcagattattaatcttttctttatggtcttggactttattgttgcataaccgctgccttcaccaggaacatataaattttcaattaaatgttcttctgagattttatgatttcactttttatattaaactcttcattttgtcttcatgtgtggtgagaggtaagaacataactttaaagcaaattaaccaactatccccaaatgaattataaataaattaatcattttccaatg

SEQ ID NO: 495 - DNA, 503 bp, Homo sapiens
ttgagccccttgttgacacttggggctgcggaggcctctccctactggtctggcctttcctgagaggcaggtcttccgtcctcagagcctttctggaacaaggagaatgcctgtgcaggtggacacacaggcctggcctgtcgctctcacttgtcttccagcggggagcttcacgttgccgagtggaagaaccatgacctccacttgcttccaaggtgctagggaagtttcagggtacgctggttcccctctccagctggaggccgagtttctggggactgcagatttttctactctgtgatcgattcaatgcccgatgcttctgtttcattcccgaccctttctactatgcattttccttttatcaggtgtataaagttaaatactgtgtatttatcactaaaaagtacatgaacttaagagacaactaagcctttcgtgtttttccacaggtgtttaagcttctctgtacagttgaaataaacagacagcaaaatggtgcc

SEQ ID NO: 496 - DNA, 706 bp, Homo sapiens
ggataacccggatgaccttctgaggtctcttcagcccttttcgctagtggtcacccaccaccatggttacttgccagcaacatctctattgctggatggtccctgtctataaccttgggctagtatattttttccaatatgggaccttagtcttactactgatgagttctatgggtctcttgctagggggtaaggatttttattcttgggcttatagagccagttagatcataattcttatgaaatagagagtgtcctaaatatcactgaaataaaaagtaggaaaaagaagcttgaattttaagactgaggctgctctgcagattctagtttggctttcagagttcaagagtggtggcatcttcacctgaattcttcaatgccagggtaataaaccaaaatagtcctaatcagtatatgctagttgagcatcggcataattttctttcctctggctgatcccagccctaaaggaagggtagacccgtgtctttccagccctaaaggaagggtagacccgtgtctttccagccctaaaggaagggcagacccgtgtctttccatgcccgagggccacgacgtcactatgcagggcacacgtggcttggtttaaaaaggtcatcttagatttatcttagtaaatgtaataaattattttttagatcttgaaatttataataaaaatactttacctaccctgatcacc

SEQ ID NO: 497 - DNA, 1410 bp, Homo sapiens
atttctcgccatggcccctgcactgctcctgatccctgctgccctcgcctctttcatcctggcctttggcaccggagtggagttcgtgcgctttacctcccttcggccacttcttggagggatcccggagtctggtggtccggatgcccgccagggatggctggctgccctgcaggaccgcagcatccttgcccccctggcatgggatctggggctcctgcttctatttgttgggcagcacagcctcatggcagctgaaagagtgaaggcatggacatcccggtactttggggtccttcagaggtcactgtatgtggcctgcactgccctggccttgcagctggtgatgcggtactgggagcccatacccaaaggccctgtgttgtgggaggctcgggctgagccatgggccacctgggtgccgctcctctgctttgtgctccatgtcatctcctggctcctcatctttagcatccttctcgtctttgactatgctgagctcatgggcctcaaacaggtatactaccatgtgctggggctgggcgagcctctggccctgaagtctccccgggctctcagactcttctcccacctgcgccacccagtgtgtgtggagctgctgacagtgctgtgggtggtgcctaccctgggcacggaccgtctcctccttgctttcctccttaccctctacctgggcctggctcacgggcttgatcagcaagacctccgctacctccgggcccagctacaaagaaaactccacctgctctctcggccccaggatggggaggcagagtgaggagctcactctggttacaagccctgttcttcctctcccactgaattctaaatccttaacatccaggccctggctgcttcatgccagaggcccaaatccatggactgaaggagatgccccttctactacttgagactttattctctgggtccagctccataccctaaattctgagtttcagccactgaactccaaggtccacttctcaccagcaaggaagagtggggtatggaagtcatctgtcccttcactgtttagagcatgacactctccccctcaacagcctcctgagaaggaaaggatctgccctgaccactcccctggcactgttacttgcctctgcgcctcaggggtccccttctgcaccgctggcttccactccaagaaggtggaccagggtctgcaagttcaacggtcatagctgtccctccaggccccaaccttgcctcaccactcccggccctagtctctgcacctccttaggccctgcctctgggctcagaccccaacctagtcaaggggattctcctgctcttaactcgatgacttggggctccctgctctcccgaggaagatgctctgcaggaaaataaaagtcagcctttttctcc

SEQ ID NO: 498 - DNA, 818 bp, Homo sapiens
tgcttgaactcgggaggcagaggttgcagtgagccaagatcatgccatcccactctagcttgggcaatagagcaaggctccgtctcaagaaaagaaggtcatttcccaagactagcatagggagtatccatttaaaatacattcatcttcctcccatttccgtgctattaatcacttgttagagcaacatgacatgcccagcatcccacttcccgaaaatgtctactccttctactctgagctcttgttgcctagacctcagaaaacaccaattcaccacagtagaaccgggagcagggatagctcagcttctctgaatagcacactttgctcaggtcttaacttgagggcctctccggtactaacatcctgcgatagcttgtcccatgagcacagaagagcctcagtagagtcaagtcctgctgcagctgccccaccccaagtttctatcatttcctctttaaacaaaaaatatgttatcctacacattagtgtcaatccaatggttgtctcttatctgtctaaatagcaaaatcatgaaaatcagctgttttatttgcataggacaactaacctgtctgtgtaactttgtttttattttaactcttactagaaaatctaatcttaaaacatttgaattctaaacatgtaaaatgtgacagcctgcaattttgtagacagtgaagtaatggctgctatttataaatggaacatctatcaaaataagtaactgtttataaaattcagtttttgtagggttttccaaggaaaaatcaccttggttgaatgtttctcactcattaaactttgcagaagtg

SEQ ID NO: 499 - DNA, 1099 bp, Homo sapiens
cgtgaccagtctggtaagaagtattaatgaagtagctaatattacagcttcattttctactagcacctatcataatggtcttagtcatttcacacaaatcagaacttccttccccaccagtgaggacaacatcttcatgctgtgattgaagcatccattcagaacacgaggcaatattgtagtccacagggaatggatgcttcacttgatctctggaccttggctgcagaggccatcgcagcttttgaaaagtgaaggggttaattcccattggtgtctttgcttatagcatttttctctaacctataacaaggagacattacattttactttagaacatgagaatagcagttttgctcatgacttaccattccagctgcatgggaaagcaaagcagaaaacagtgccccaaatggaaaaaagatactcacacagaacaaaacagttctttgtcttgttcttggtcttgtcaaaccttgcctgatgctctttctaaagtcaaaatatgaatgctaagaaggcataacctacatccttctctgatttcttcagcagggtcaaaagacagttactagcaatggggaatgcttgtcactgtggagaaagagttttgtatatgtctgataccgttgttataacaaaacaaatttttttactatagttttttgttttctacctgcacacccaccagaagagcacaaatcaaggccattgcaacaggcatttaaaaattattatcaaacatgcacatgcctgtacacacacacacacacacacacaaacaggggcatttgtaaaggtgtccctggaatgtaagatttataatgtttaaggcaaggtgaaggcattgccaagtgtgtgtcgctcataagactagtgtatattcactgaaagttaacctgatgatttgttattgtttgaaccatatgctgatttgcttctggtttctgtttagtgtgttctctctgataaggggctgaaagattctgcatcacacatcctctgagacctaccatgtcgcacactttgttaatgacaaacttcactctacactatacagtaccttgttgatatattcagtaaagtcttattttaaaag

SEQ ID NO: 500 - DNA, 1197 bp, Homo sapiens
aggcggcggccatggcgggacaggaggatccggtgcagcgggagattcaccaggactgggctaaccgggagtacattgagataatcaccagcagcatcaagaaaatcgcagactttctcaactcgttcgcctactcagcaggaagacaatgaggatgaagacctttatgatgatccactgccatttaatgaataatatgtcttgtcgttcaagacttgcaacactaaacgagaaattgacagcccttgaacggagaatagagtacattgaagctcgggtgacaaaaggtgagacactcacctagaacagtgccgtgctgctgctgggaagttgctttacacaacacaggccacatgggaaaggccccagcagccttcagctccttcctttctccttaaagagcaacagggcttattcttgtttttcttttttcaaaagtgtggcctttgggctctgccatctggggtgtggtgtggtatgtgggaagaagttcagaggaaccgttggaaacgacgttaggcattttaccttttcagtaacattttatacatctacttgtcaatgtatttgagacattcacagccaaaagcctgggactctttgtgaaggtcctcctcacctctatctttctttctctctctctcaaactttccttaaagttctcattgcctttgcactgcttctgtgaacagtctttgtctcctccccacctttggtggaagtgcggggcagtcctggtcaagacactcatgccctggcaatgtggctgccagagaatgttgttgctaacccaccagtttcttgttgatttggagaggtcaaggccaggcccccacttggcttgaagggacattttcagacttttctttctgtcacttggagtgtctatgcctctcatatttccctaataaactcctcaactttttatctgactgctgtgattatggtggggagaggagctagagatgggctcacttattgcacagaaatgtaatacatggcgttattattctaacataaaactttcagatgtagctgtttgattcaaatcctaggtggcttaccagcccaagtccccatgtttggactttcagctgactagctcatcctgggaatcatttggtcgttcagcacatttaccaagtatttactatgtaggcatgttaaactccaataaaacatacagcattgaatcag

SEQ ID NO: 501 - DNA, 1710 bp, Homo sapiens
ttgaataagaagctggatttgatttcttatccaaactttctaactctaaaattctaccatcatagaaacttatatatcaatgaataaaatcacattatattttttctaatagactatattaaaatggaaagaaaatggatttcgactcagcacgagaatcttctaataaaaagcttttcaaccatgggacaggaatctttgaaagaaggcagctatacatccctgtttccctgggactcctggtttatgcttgtttctggagataatgatatatagctcctccattcactcaccacagtgtcctgatttttgaacaataaattacatagtcattctacttataaggcattgagcacactgaccctggaggtaactctctctagaatggactaagtggactgtcaaggataacaatcattctgacattgaacaggacatagactcttattcatccagattcttgtcctaccaaaatctaaaaaaaaaaaaaattatataagtcatttaggcttttgcagactatcagtttgtagataactgctctacctcaataaatttcttgatacacaagacaaatgcctttctttaaaatactacccaaaaagaggtaattaattaaaaatacgctatctctttggagataaaattatatcactgagttttgaaatttttttggaaatgtattgctctcatttcttattaatttgtgtgattgattatccctggctttatgataataagaagtcaagttctaaatggaatactaatgtttctaagtttaaagtttgtgatacctcaaagtatctgcaaacatttctacaggaatttaaatattccaaaacgccttaaaaaacttaatgaatattacaatgcatttagttcatgatataccattagaaagaaggaaggagtgatgaattagtaatttcacagattaaaccacaggatgtggtagcttaaagaaatttagaaattattagattagtctgggtgcagtggttcgcgcctgtaatcccagcactttgggaggctgaggcaagtgcatcacctgaggtcaggggttcgagactagcctggccaacatggtgaaaccccatctctactagaatacaaggattagccgggcatggtggcatgcgcctgtagtcccagctgcttgggaggctgaggcgggagaattgcttgagcccgggaggcggaggttgaggtgagccaagattgcaccattccactccagcctggatgacggaatgaaactccatttcaaaaaaaaaaaaaaatcgttagattaaaatatgatctgaaaaacagaaaacggccaagattagttgtttcagttattcatggaatcacccaatggttaaacatggttgtacatgcctctacattttgtctgtattttaagtatacacacgcgcgcgcacacacacgcacacacatatatatacaaatatatatacacacatatgtatacagagagcatatgataatcatccaatgaactggtaagtaaagactaattgaatattcattgtactggtaaagttcaaaatgaaggctaaatagagctatttcttttcaccacagtttttgtttacttaagtgcaagtgaggtacattaagaaaataaaaactcaacggaaaccacacataacccacgttaattgtttatatttaaacttatctgtgtaaagtatggggacaagctcc

SEQ ID NO: 502 - DNA, 2046 bp, Homo sapiens
  misc_feature 1761,1852,1853: n = a,t,g, or c
atcctgcagccttttgacttctcaaacctcccatacaagggaccaacacaggagtctagaattaactgggaggctcactgaagggatagagaggaacagagatgccttttaagccagaggttttacagatgatgttgaaggccctgccccacagaaaacatgcagggtcaccctcagtgcccctggccttggcattgctggcatcccctggggcgcctccccaccaggcagttttcagggactgtttacttgccctaaaatcaaacaaggcaacatgttgactacagtatttaaaatcagtattaaagtacagtattaaaaatatttttcaagtcaattaagttccagactccctaaagtagggttcagcaaataagcgcccagagggaaaatccggcctttcatcgaattttgtatggacccaaatgaagaatggttttcacaatggggcaaggactgaaaaaaattaaaagacaaaaaagaattcaagacacatgaaacttaattgaaattcagatttcagcatccaaaatggtgtttcactggagcccagctacacccattcatcgatgtattgtctgtggctgtttttgagctaagagagttagcagttttggcagagacttgcataaacagcaaagccccaaatatttactatttggccctttatagaaaatgcttactgactcccaccccagaggaaaccaaaagaagtcagatctcccacaggagggctaatggcaggcttgccaccaagaaaactgggggaccctgaacctctgaaacagatgaccttcttccccagtgacctccccagacctagggaatcatggctcctgggcaccaacgggccctcaggtcccttatcccccattcagaagggagaggtggcccctgggtcatagtcttgaaaacaggtcaaagatcactcccttccttgctatctgggaggaaagatcaaagtcgagagacaaggcgagaggaaagcaggtaggatgcctcaacatcacaaagagcacaggcacttcgatgagagtctggctcaggcttttgagtctaacctagaaaatattttctgagcacatcctttgaacaaggctctgtgctctgtgttgacagatgcccagatgagtcaggcttccccacggctgccttatctctgagctcatatctgacagtgaacctggcttcagcctcccgtccttgaccctggcccgtcttctttagggagatgtggtgcaaacctctctgtgtgctggtcttgctccctggtgcagccgggtgggcccccagcccacagcccacactccatgctcacctgaggctgcacaccagctcggtgaagcggggccggtcactggggtcgtagtcccagcagcgggtcatgagggtataaaggaccggtggacagagatcaggcttgggcagccggtctcctttctccagcaccccgatgacatccttgttctccagccagaagaagggctgcttcccaaagctcaggatctcccacatgcacacggctggggtgtaagggagcgtcaggccctgggtgggggagaccagtccctcccacccaggagcaccatcgccattagcactcagtctccaccaggagcagctctcgcggctccctcctcctcctccagcaccctggggtcctgcctaccatggtggtctgcctgagggacaagtgacctacctctgcagtaagtgacctaaggccttgctcgctagacccctgtcagggtgctgcaggancaagaggtggcagtcatggcatgctattgggaccacaagtgctctctctcttaggagggagcgggagccactccttagtaaagctggaaannaaaacctcgcaccaacacttggtgcctgtgtgattgcgggcaggctcctgactcatctgagcctcagttttcgtaacaggaaaatgagagtaataataatgttctacagggttggctgtgggagcactaagtgagatggtttgcaggaggtgttccgtaaggggctgtctctctacacctgccccttagaaaa

SEQ ID NO: 503 - DNA, 2331 bp, Homo sapiens
  misc_feature 2027: n = a,t,g, or c
gctttttttttttttttgtttcgtggtggtggctggcatgattggtggggtcactgagggcctggccagtcactgggtaggcagctttctcactgggaagcatgggttggaacatgaggggcctatggctgtgtccgccccagcaaagacaagaccttcccactcattatgttcattggctgccactcagccagggtggagtggcaccactgagtcaccggaaggtcctattaaccagaaatttgcatgttgaccagtaaccatggcaacctgatgctggactcccaacagggctgtgcttaccagacaatatgcaaattcttcatcctggacatgtcccatgccatacagtcataggctgcctggacaaggaggcagtgatgtgtacagatgttagcatgagctcctgtgtttgcacttgtgtgtgcaggtgtgagcacatgctcatgggtttgctcatgtgtgcaggtatgtaagaacatgattgtgtgtttgtgcatgtatgagcccatgctcatgcgtttgtgcttgtgtgtacaagtatgtgtgctcttttacatggggacataaagatggacaagctttgacccgtggggaatggaggggctgtttgtggaagaaagaaaagcttcaatgtgctattgcagtcacaggctctttctttgatctctgcaaaagataacctggtctagatgctatctgggcaggttggacactttgctcaggatgtgctgggagtcagcctctagggggctgatgctgccctgccccgcataccagttgtagctgggagaggtactaaattgtgctccaatcacaatggcaggctctctgctaagcccttcttatgcagcacttcatttcatcctcacagtaaccccacaggcataaatgtcatcatccccattttacagatgagaaaacaaattgagaagttaaagaggccccagagctagtaagctcagcagctggcatttttactgaggtctctttgaatccgaagcctgaacacttaagccagcactttacactaccttttcagtaattatctgctagagcagtacatgaagtgctctctgggaaagtgcttgaagagcataaatcctttacgaaaaggtaacagtcaagctactgaagacactaggcagaagggcctggactgcctttgcaggctcttttctgggctcccggggccctgctgaccttcctagcagatctaggctgaaagctgaagcagcccagctggcagagaggccttggatagcggcccggttccggaggctctgctgctctgattcaggacaggctgggactcgccatccaggacagtctcacaagcccgggaggctctctgccgagaggaatattgccccactgtctcttgcccctggcccccagctctgcctaggctctgccttctcttgaggtccctcctgctctacagtcctgcactcagggctggatatgactctgaaatgattgcagagcctgcgttctagagaattctgttgggccacatgtcctgcccacaggctctgcccttcctccttggcctcccacactctattaagatagttgaccatctgggccaagcagctcccatcccccaggggtctctatgcccctgtggggttggggtggggagtaacttgctggacttttgtgctgtggtctgaggagtactgggaaggatcatttctccaccctgagacctaaatccccaaaccccttttctccaaggctacctacatggtcccctggatcccacctttagcacctcccagagttctacctcccagtatccagtgccatgtggacacttggttccacactcctcatggggcccagctgtcctccctggagaagaggaggtcggggggcacgcaggggcctagcctgctctgcaggatgggatgggtaactggggacaggccttgcaagccagcggacccctggtcctcaagcagaatcaatggccggccagaggctttttgttctgctccacctccacctggtggtgctggaangaactgctctcaggccccaaataaaagcactccataattatggctgggtccttgggcctcggggctcacttttctttctttcttctccttcttcttcttcttttttttttttttttgcaaactgtgcaaaagggaaagctccaacctcataagttgaagaaaggaagggaataaaatcctagatgggaggattcagaccacagaggtgctgagagagtcaccagttacccctcaattcctcatttcctcaactttttagcatctccagcaccaacccccgccccctctcccaccaccacgaaac

SEQ ID NO: 504 - DNA, 2170 bp, Homo sapiens
  misc_feature 1102,1104,1111,1205: n = a,t,g, or c
gttgcagtgagccaagatggtgccactgcactccagcctggcaacagtgcgcagagcgagacgccgtctcaaaacaaaagtctcacagtgagcccagcctcctttcctgccatccctggagttgtggtctgtttgaggtttggttttcaggactgaagcttcaagatggctgaccaggaccctgcgggcatcagccccctccagcaaatggtggcctcaggcaccggggctgtggttacctctctcttcatgacacccctggacgtggtgaaggttcgcctgcagtctcagcggccctccatggccagcgagctgatgccttcctccagactgtggagcctctcctataccaaatggaagtgcctcctgtattgcaatggtgtcctggagcctctgtacctgtgcccaaatggtgcccgctgtgccacctggtttcaagaccctacccgcttcactggcaccatggatgccttcgtgaagatcgtgaggcacgagggcaccaggaccctctggagcggcctccccgccaccctggtgatgactgtgccagctaccgccatctacttcactgcctatgaccaactgaaggccttcctgtgtggtcgagccctgacctctgacctctacgcacccatggtggctggcgcgctggcccgccgtgagcatagtcttgggcctttgacctccctctgtccccacctcggcccaaacccagtcagtcccagctcccagccccaacctctgccagcctagggataggggggtgttctaggtccccagacctgggacagcaggtaggtgatgccatgtaagacctgtgatctcacttctccccattgtcacccccaatcccccacacagtgggcaccgtgactgtgatcagccccctggagcttatgcggacaaagctgcaggctcagcatgtgtcgtaccgggagctgggtgcctgtgttcgaactgcagtggctcaaggtggctggcgctcactgtggctgggctggggccccactgcccttcgagatgtgcccttctcaggtaggcacccaagctgcaaggggtgggtgagggaacccttgggtgatgcacaaagggtctacagccnangtccaantttgtgactagtgaccatgaagttacttagcttttcttgacccatgggtttctcatctgtgaagtgggcctagcaggtagagtatttgcccagncggtcagaagattaattcctacagagtgcctgcttctgagcctgcatgtagcagacaagactcacagctgggagggagtggtggcagtgaaaggtggacggtctggggccacttccttgcccttcccgtctctaatcagtgcatcccccaccccaagccctgtactggttcaactatgagctggtgaagagctggctcaatgggttcaggccgaaggaccagacttctgtgggcatgagctttgtggctggtggcatctcagggacggtgagtggactgggctgaaggtgaggccagcggaggtctccctgcggggggcctgaggatttttggagatgcccagaagcagaccccatgaggcctttgtccctcccagccgcaagagccatctgggaggtaggggtgggggtccaggaagtggagctgagccctctccccgcccaccccaccaggtggctgcagtgctgactctaccctttgacgtggtaaagacccaacgccaggtcgctctgggagcgatggaggctgtgagagtgaaccccctgcatgtggactccacctggctgctgctgcggaggatccgggccgagtcgggcaccaagggactctttgcaggcttccttcctcggatcatcaaggctgccccctcctgtgccatcatgatcagcacctatgagttcggcaaaagcttcttccagaggctgaaccaggaccggcttctgggcggctgaaaggggcaaggaggcaaggacacccgtctcatcccacggatggggagatgggcaggaggagacccagccaagtgccttttcctcagcactgagggagggggcttgtttcccttccctcccggcgacaagctccagggcagggctgtccctctgggcggcccagcacttcctcagacacaacttcttcctgctgctccagtcgtggggatcatcacttacccaccaccacgaaac

SEQ ID NO: 505 - DNA, 1943 bp, Homo sapiens
aggtgagggactgcgggccggaggggatccagcgagtcagctgccgccgagggaccagcgcgggtctagctgctgccgccatccccaccatccctgaccgcgcctgcccgggctccgcgccaggaggagcggccaggcccagccccggcaccgcgcgctcggggaccccgacggcgcccagcccggcgaggggcctcagggggaggacgaggaggaaaggcggcctcgccggggacccggccatggcgctggacttcttggctggatgcgcggggggtacggcttcaggtccagagcgtggagaagcctcagtaccgcgggacgttgcactgcttcaagtccatcatcaagcaagagagcgtgctgggcctgtacaagggcctgggctcgccgctcatggggctcaccttcatcaacgcgctggtgttcggggtgcagggcaacaccctccgagccctgggccacgactcgcccctcaaccagttcctggcaggtgcggcggcgggcgccatccagtgcgtcatctgctgccccatggagctggccaagacgcggctgcagctgcaggacgcgggcccagcgcgcacctacaagggctcgctggactgcctcgcgcagatctacgggcacgagggtctgcgtggcgtcaaccggggcatggtgtccacgttgctgcgtgagactcccagcttcggcgtctacttcctcacctatgacgctctcacgcgggcgctgggctgcgagccgggcgaccgcctgctggtgcccaagctgctgttggcgggcggtacgtcaggcatcgtgtcctggctctctacctatcctgtggacgtggtcaagtcgcggctgcaggcggacggactgcggggcgccccgcgctaccgcggcatcctggactgcgtgcaccagagctaccgcgccgaaggcttggcgcgtcttcacacgggggctggcgtcacgttgctgcgcgccttccccgtcaacgctgccactttcgccaccgtcacggtggtgctcactacgcgcgcgcgaggaggccgggcccgagggcgaggctgtgcccgccgcccctgcggggcctgccctggcgcagccctccagcctgtgacgctcaccccgccctccttccccagggctccttctcagaaacttgggacataaattggcccctgagtcgattgccctgcttcctgctgggatgctgcgagctgtggagtctatcagacgtgggctgaattttgctgatcagctgggtagttttggccgagaactgcacttgcctcagtgttctcatctatgaaataaggaccctcatgcccacactgtagagtcacgaagctcagagattattcccagcagcagccagcacctggcctggctgaggccattgcaccgttatcctggaaactgaggcagacactccagcccctttctgggatcctggccacgtcattgtgctcctgccctgcaggctggctcccgggggtctctgatggccaaccaaggggccacccagggacctctaactccacacatcctccacccgggggggtggtgggccacccctctggtctgtgttagggacagaggaaaacttggtgtgcctcctggtgtcacagaactggatcctctgcataccccagcttctccacatgccactgctaggggtaccccagctgctgccactcctgctggagggtgaactggggaccctgcaccctccgggaagccatggagtctgctggaggcaccatatcagcctgcgggactagggtggggagcaaacaggccagcggtggaggtctggacagttcaagtgtgatgcagctgtggcaaggagaaatccttccgcctctgggcctcaggctgcctgtccataaaatggggacatggccagctgacggacaactgagtctccggcccacctaccaccaccacgaaac

SEQ ID NO: 506 - DNA, 2300 bp, Homo sapiens
cggaaagccttcctgctcctgctgctcttggggctggtgcagctgctggccgtggcgggtgccgagggcccggacgaggattcttctaacagagaaaatgccattgaggatgaagaggaggaggaggaggaagatgatgatgaggaagaagacgacttggaagttaaggaagaaaatggagtcttggtcctaaatgatgcaaactttgataattttgtggctgacaaagacacagtgctgctggagttttatgctccatggtgtggacattgcaagcagtttgctccggaatatgaaaaaattgccaacatattaaaggataaagatcctcccattcctgttgccaagatcgatgcaacctcagcgtctgtgctggccagcaggtttgatgtgagtggctaccccaccatcaagatccttaagaaggggcaggctgtagactacgagggctccagaacccaggaagaaattgttgccaaggtcagagaagtctcccagcccgactggacgcctccaccagaagtcacgcttgtgttgaccaaagagaactttgatgaagttgtgaatgatgcagatatcattctggtggagttttatgccccatggtgtggacactgcaagaaacttgcccccgagtatgagaaggccgccaaggagctcagcaagcgttctcctccaattcccctggcaaaggtcgacgccaccgcagaaacagacctggccaagaggtttgatgtctctggctatcccaccctgaaaattttccgcaaaggaaggccttatgactacaacggcccacgagaaaaatatggaatcgttgattacatgatcgagcagtccgggcctccctccaaggagattctgaccctgaagcaggtccaggagttcctgaaggatggagacgatgtcatcatcatcggggtctttaagggggagagtgacccagcctaccagcaataccaggatgccgctaacaacctgagagaagattacaaatttcaccacactttcagcacagaaatagcaaagttcttgaaagtctcccaggggcagttggttgtaatgcagcctgagaaattccagtccaagtatgagccccggagccacatgatggacgtccagggctccacccaggactcggccatcaaggacttcgtgctgaagtacgccctgcccctggttggccaccgcaaggtgtcaaacgatgctaagcgctacaccaggcgccccctggtggtcgtctactacagtgtggacttcagctttgattacagagctgcaactcagttttggcggagcaaagtcctagaggtggccaaggacttccctgagtacacctttgccattgcggacgaagaggactatgctggggaggtgaaggacctggggctcagcgagagtggggaggatgtcaatgccgccatcctggacgagagtgggaagaagttcgccatggagccagaggagtttgactctgacaccctccgcgagtttgtcactgctttcaaaaaaggaaaactgaagccagtcatcaaatcccagccagtgcccaagaacaacaagggacccgtcaaggtcgtggtgggaaagacctttgactccattgtgatggaccccaagaaggacgtcctcatcgagttctacgcgccatggtgcgggcactgcaagcagctagagcccgtgtacaacagcctggccaagaagtacaagggccaaaagggcctggtcatcgccaagatggacgccactgccaacgacgtccccagcgaccgctataaggtggagggcttccccaccatctacttcgcccccagtggggacaaaaagaacccagttaaatttgagggtggagacagagatctggagcatttgagcaagtttatagaagaacatgccacaaaactgagcaggaccaaggaagagctttgaaggcctgaggtctgcggaaggtgggaggaggcagacgccctgcgtggcccatggtcggggcgtccacgccgaggccggcaacaaacgacagtatctcggattccttttttttttttttttttaattttttatactttggtgtttcacttcatgctctgaatactgaataaccatgaatgactgaatagtttagtccagatttttacagaggatacatctatttttatcattatttggggtttgaaaaatttttttttacaccttctaatttctttatttctcaaagcagataattcttctgtgtgaaaatgttttctttttttaatttaaggtttaaaattccttttccaaatcaaaaaaaattccccccc

SEQ ID NO: 507 - DNA, 1989 bp, Homo sapiens
ttagacaggagcatgcaggggggtttggtgggcaatgatgagactgtggcactcacagcctttgtgaccatcgcccttcatcatgggctggccgtcttccaggatgagggtgcagagccattgaagcagagagtggaagcctccatctcaaaggcaaactcatttttgggggagaaagcaagtgctgggctcctgggtgcccacgcagctgccatcacggcctatgccctgacactgaccaaggcgcctgtggacctgctcggtgttgcccacaacaacctcatggcaatggcccaggagactggagataacctgtactggggctcagtcactggttctcagagcaatgccgtgtcgcccaccccggctcctcgcaacccatccgaccccatgccccaggccccagccctgtggattgaaaccacagcctacgccctgctgcacctcctgcttcacgagggcaaagcagagatggcagaccaggctgcggcctggctcacccgtcagggcagcttccaagggggattccgcagtacccaagacacggtgattgccctggatgccctgtctgcctactggattgcctcccacaccactgaggagaggggtctcaatgtgactctcagctccacaggccggaatgggttcaagtcccacgcgctgcagctgaacaaccgccagattcgcggcctggaggaggagctgcagttttccttgggcagcaagatcaatgtgaaggtgggaggaaacagcaaaggaaccctgaaggtccttcgtacctacaatgtcctggacatgaagaacacgacctgccaggacctacagatagaagtgacagtcaaaggccacgtcgagtacacgatggaagcaaacgaggactatgaggactatgagtacgatgagcttccagccaaggatgacccagatgcccctctgcagcccgtgacacccctgcagctgtttgagggtcggaggaaccgccgcaggagggaggcgcccaaggtggtggaggagcaggagtccagggtgcactacaccgtgtgcatctggcggaacggcaaggtggggctgtctggcatggccatcgcggacgtcaccctcctgagtggattccacgccctgcgtgctgacctggagaagctgacctccctctctgaccgttacgtgagtcactttgagaccgaggggccccacgtcctgctgtattttgactcggtccccacctcccgggagtgcgtgggctttgaggctgtgcaggaaatgccggtggggctggtgcagccggccagcgcaaccctgtacgactactacaaccccgagcgcagatgttctgtgttttacggggcaccaagtaagagcagactcttggccaccttgtgttctgctgaagtctgccagtgtgctgaggggaagtgccctcgccagcgtcgcgccctggagcggggtctgcaggacgaggatggctacaggatgaagtttgcctgctactacccccgtgtggagtacggcttccaggttaaggttctccgagaagacagcagagctgctttccgcctctttgagaccaagatcacccaagtcctgcacttcaccaaggatgtcaaggccgctgctaatcagatgcgcaacttcctggttcgagcctcctgccgccttcgcttggaacctgggaaagaatatttgatcatgggtctggatggggccacctatgacctcgagggacacccccagtacctgctggactcgaatagctggatcgaggagatgccctctgaacgcctgtgccggagcacccgccagcgggcagcctgtgcccagctcaacgacttcctccaggagtatggcactcaggggtgccaggtgtgagggctgccctcccacctccgctgggaggaacctgaacctgggaaccatgaagctggaagcactgctgtgtccgctttcatgaacacagcctgggaccagggcatattaaaggcttttggcaac

SEQ ID NO: 508 - DNA, 2262 bp, Homo sapiens
aggttccccttggccggtgtgaacgacatgggaagtgtaaaaaaacctgtattgcctccagagacccatattgtggatggataaaggaaggtggtgcctgcagccatttatcacccaacagcagactgacttttgagcaggacatagagcgtggcaatacagatggtctgggggactgtcacaattcctttgtggcactgaatggagtgattcgggaaagttacctcaaaggccacgaccagctggttcccgtcaccctcttggccattgcagtcatcctggctttcgtcatgggggccgtcttctcgggcatcaccgtctactgcgtctgtgatcatcggcgcaaagacgtggctgtggtgcagcgcaaggagaaggagctcacccactcgcgccggggctccatgagcagcgtcaccaagctcagcggcctctttggggacactcaatccaaagacccaaagccggagccatcctcacgccactcatgcacaacggcaagctcgccactcccggcaacacggccaagatgctcattaaagcagaccagcaccacctggacctgacggccctccccaccccagagtcaaccccaacgctgcagcagaagcggaagcccagccgcggcagccgcgagtgggagaggaaccagaacctcatcaatgcctgcacaaaggacatgccccccatgggctcccctgtgattcccacggacctgcccctgcgggcctcccccagccacatccccagcgtggtggtcctgcccatcacgcagcagggctaccagcatgagtacgtggaccagcccaaaatgagcgaggtggcccagatggcgctggaggaccaggccgccacactggagtataagaccatcaaggaacatctcagcagcaagagtcccaaccatggggtgaaccttgtggagaacctggacagcctgccccccaaagttccacagcgggaggcctccctgggtcccccgggagcctccctgtctcagaccggtctaagcaagcggctggaaatgcaccactcctcttcctacggggttgactataagaggagctaccccacgaactcgctcacgagaagccaccaggccaccactctcaaaagaaacaacactaactcctccaattcctctcacctctccagaaaccagagctttggcaggggagacaacccgccgcccgccccgcagagggtggactccatccaggtgcacagctcccagccatctggccaggccgtgactgtctcgaggcagcccagcctcaacgcctacaactcactgacaaggtcggggctgaagcgtacgccctcgctaaagccggacgtaccccccaaaccatcctttgctcccctttccacatccatgaagcccaatgatgcgtgtacataatcccagggggagggggtcaggtgtcgaaccagcaggcaaggcgaggtgcccgctcagctcagcaaggttctcaactgcctcgagtacccaccagaccaagaaggcctgcggcagagccgaggacgctgggtcctcctctctgggacacaggggtactcacgaaaactgggccgcgtggtttggtgaaggtttgcaacggcggggactcaccttcattctcttccttcactttcccccacaccctacaacaggtcggacccacaaaagacttcagttatcatcacaaacatgagccaaaagcacatacctaccccatcccccacccccacacacacacacacatgcacacaacacatacacacacacgcacagaggtgaacagaaactgaaacattttgtccacaacttcacgggacgtggccagactgggtttgcgttccaacctgcaaaacacaaatacattttttaaaatcaagaaaatttaaaaagacaaaaaaaaaagaattcattgataattctaactcagactttaacaatggcagaagtttactatgcgcaaatactgtgaaatgcccgccagtgttacagctttctgttgcagcagataaatgccatgttgggcaactatgtcatagatttctgctcctcctctcttttaatgaaataacgtgaccgttaacgcaagtaactctttatttattgttcaccctttttttccttaaggaaaggactcttccaaatatcatcctatgaacagctcttcagaaagcccattgaaagttaaactatttaacgtgaaatccattaactggaataattgagtttctttatttttacaataaattcactgagtaaataag

SEQ ID NO: 509 - DNA, 734 bp, Homo sapiens
ggcagctgacctctccagttgctgtgttgtattcctacccaatttcctgggcagttgatgcatctctgggaaaaacaccagaaagcttgctgaaatggaaaacttggaagaattgttcatctcttaggcttccatttggatgggcctgccttaacattgtttgaaatgcagcgtgagtagctcttttgtatactgtttacaccccttattggcatgtcaactcctgtacttcccttactctgttgcctttcttgagatgcattgtcctgctaacccacaaacctgtttggaaataaacatggaagaatatctggcaggcttacttttagaagacgacaaatcggtaaggcttattcatggttcattgccaggagcagatatgcttttgagatcacttttatttttgaaatggcctttgttcattgtattgtgatccaataacactttgtattaaattgtttagcagccatttgtgttgtgaaggggtagaagatctctgaaacttgtcttgagattgaactcattccctgttccacaaacccatatgtatcctttcctctacctcctcctttcccaattaatttcaaccatagtacgatgtttggggttgtctcttttgttaaaaagattaaagaatttatgagttggcttggacaagtttaactttatttttaatgtgttaattacttggaataaatgcattaatctcgggtctaaaaaaaaaccttagaaaa

SEQ ID NO: 510 - DNA, 1636 bp, Homo sapiens
gcggagtaaagggacttgagcgagccagttgccggattattctatttcccctccctctctcccgccccgtatctcttttcacccttctcccaccctcgctcgcgtagccatggcggagccgtcggaggccactcagtcccattccatctcctcgtcgtccttcggagccgagccgtccgcgcccggcggcggcgggagcccaggagcctgccccgccctggggacgaagagctgcagctcctcctgtgcggtgcacgatctgattttctggagagatgtgaagaagactgggtttgtctttggcaccacgctgatcatgctgctttcctggcagctttcagtgtcatcagtgtggtttcttacctcatcctggctcttctctctgtcaccatcagcttcaggatctacaagtccgtcatccaagctgtacagaagtcagaagaaggccatccattcaaagcctacctggacgtagacattactctgtcctcagaagctttccataattacatgaatgctgccatggtgcacatcaacagggccctgaaactcattattcgtctctttctggtagaagatctggttgactccttgaagctggctgtcttcatgtggctgatgacctatgttggtgctgtttttaacggaatcacccttctaattcttgctgaactgctcattttcagtgtcccgattgtctatgagaagtacaagacccagattgatcactatgttggcatcgcccgagatcagaccaagtcaattgttgaaaagatccaagcaaaactccctggaatcgccaaaaaaaaggcagaataagtacatggaaaccagaaatgcaacagttactaaaacaccatttaatagttataacgtcgttacttgtactatgaaggaaaatactcagtgtcagcttgagcctgcattccaagctttttttttaatttggtgttttctcccatcctttccctttaaccctcagtatcaagcacaaaaattgatggactgataaaagaactatcttagaactcagaagaagaaagaatcaaattcataggataagtcaataccttaatggtggtagagcctttacctgtagcttgaaaggggaaagattggaggtaagagagaaaatgaaagaacacctctgggtccttctgtccagttttcagcactagtcttactcagctatccattatagttttgcccttaagaagtcatgattaacttatgaaaaaattatttggggacaggagtgtgataccttccttggtttttttttttgcagccctcaaatcctatcttcctgccccacaatgtgagcagctacccctgatactccttttctttaatgatttaactatcaacttgataaataacttataggtgatagtgataattcctgattccaagaatgccatctgataaaaaagaatagaaatggaaagtgggactgagagggagtcagcaggcatgctgcggtggcggtcactccctctgccactatccccagggaaggaaaggctccgccatttgggaaagtggtttctacgtcactggacaccggttctgagcattagtttgagaactcgttcccgaatgtgctttcctccctctcccctgcccaccacgaaac

SEQ ID NO: 511 - DNA, 1856 bp, Homo sapiens
ctcatcactgagtcctttggagctgagttatgtcaacagctgccttaattactttggtcagaagtggtgggaaccaggtgagaaggagagtgctgctaagctcccgcctgctgcaggacgacaggcgggtgacacccacgtgccacagctccacttcagagcctaggtgttctcggtttgacccagatggtagtgggagtccagctacctgggacaattttgggatctgggataaccgcattgatgagccaattctgctgccacccagcattaagtatggcaagccaattcccaaaatcagcttggaaaatgtggggtgcgcctcacagattggcaaacggaaagagaatgaagatcggtttgacttcgctcagctgacagatgaggtcctgtactttgcagtgtatgatggacacggtggacctgcagcagctgatttctgtcatacccacatggagaaatgtattatggatttgcttcctaaggagaagaacttggaaactctgttgaccttggcttttctagaaatagataaagccttttcgagtcatgcccgcctgtctgctgatgcaactcttctgacctctgggactactgcaacagtagccctattgcgagatggtattgaactggttgtagccagtgttggggacagccgggctattttgtgtagaaaaggaaaacccatgaagctgaccattgaccatactccagaaagaaaagatgaaaaagaaaggatcaagaaatgtggtggttttgtagcttggaatagtttggggcagcctcacgtaaatggcaggcttgcaatgacaagaagtattggagatttggaccttaagaccagtggtgtcatagcagaacctgaaactaagaggattaagttacatcatgctgatgacagcttcctggtcctcaccacagatggaattaacttcatggtgaatagtcaagagatttgtgactttgtcaatcagtgccatgatcccaacgaagcagcccatgcggtgactgaacaggcaatacagtacggtactgaggataacagtactgcagtagtagtgccttttggtgcctggggaaaatataagaactctgaaatcaacttctcattcagcagaagctttgcctccagtggacgatgggcctgattaccagctgggacttagagtttctgtgcaacagtttttcactgagcatgtcaagaaactgataagatcaaaaaggtctcctaactcactagatcagcgcacaagtcagtgtaaaccacttagatagtagttttttcataaatgctcatcatatttatgttccgctgtacatgttcagtataaatatatgtgtagtgaagctactgtgagtctttaaatggaaagagcaaatgagaagtggtttggatacacttgatgagagatgagagtgtcacattaataatttttaagactcttaggcagctatgggtttcttttgatcatttttgttctttattcatttgaacacgtttttgaagttcttcaaaactagtcagtttgaattttgacagctattcaatatgtgatctccaagtttaaaaaaatttttttccagacttccctaatcctaaaatgcgagtttttatttttaataactgtaccaaggaataagtatgaaaacagttctctgttaccatattttgtattctggaccacttactggtgaaagcaaccatgcaaaagaaattaatttggccaggcacagtggctcatgcctgtaatcccagcactttgggaggccaaggtgggtagatcatctgaggtcaggaattcaagaccagcctggccaacatggtgaaaccctgtctctagtaaaaattccccccc

SEQ ID NO: 512 - DNA, 1247 bp, Homo sapiens
ctacgagttcatcatgaagaacttcccttactaccgcgagaacaagcagggctggcagaactccatccgccacaatctgtccctcaacaagtgcttcgtgaaggtgccgcgccactacgacgacccgggcaagggcaactactggatgctggacccgtcgagcgacgacgtgttcatcggcggcaccacgggcaagctgcggcgccgctccaccacctcgcgggccaagctggccttcaagcgcggtgcgcgcctcacctccaccggcctcaccttcatggaccgcgccggctccctctactggcccatgtcgcccttcctgtccctgcaccacccccgcgccagcagcactttgagttacaacggcaccacgtcggcctaccccagccaccccatgccctacagctccgtgttgactcagaactcgctgggcaacaaccactccttctccaccgccaacggcctgagcgtggaccggctggtcaacggggagatcccgtacgccacgcaccacctcacggccgccgcgctagccgcctcggtgccctgcggcctgtcggtgccctgctctgggacctactccctcaacccctgctccgtcaacctgctcgcgggccagaccagttactttttcccccacgtcccgcacccgtcaatgacttcgcagagcagcacgtccatgagcgccagggccgcgtcctcctccacgtcgccgcaggccccctcgaccctgccctgtgagtctttaagaccctctttgccaagttttacgacgggactgtctgggggactgtctgattatttcacacatcaaaatcaggggtcttcttccaaccctttaatacattaacatccctgggacaagactgtaagtgaacgttttacacacatttgcattgtaaatgataattaaaaaaataagtccaggtattttttattaagcccccccctcccatttctgtacgtttgttcagtctctagggttgtttattattctaacaaggtgtggagtgtcagcgaggtgcaatgtggggagaatacattgtagaatataaggtttggaagtcaaattatagtagaatgtgtatctaaatagtgactgctttgccatttcattcaaacctgacaagtctatctctaagagccgccagatttccatgtgtgcagtattataagttatcatggaactatatggtggacgcagaccttgagaacaacctaaattatggggacaaggcggcaaggct

SEQ ID NO: 513 - DNA, 1551 bp, Homo sapiens
caccattcggcttatttgttttccctcctcttaggattgccccctgtgggtcactttctcagtcattttgagctcagcctaatcaaagactgaggttatgaagtcgatcctagatggccttgcagataccaccttccgcaccatcaccactgacctcctgtacgtgggctcaaatgacattcagtacgaagacatcaaaggtgacatggcatccaaattagggtacttcccacagaaattccctttaacttcctttaggggaagtcccttccaagagaagatgactgcgggagacaacccccagctagtcccagcagaccaggtgaacattacagaattttacaacaagtctctctcgtgcttcaaggagaatgaggagaacatccagtgtggggagaacttcatggacatagagtgattcatgggcctgaaccccatgcagcagctggccattgctgtcctgtccctcacgctgggcaccttcacggtcctggagaacctcctggtgctgtgcgtcatcctccactcccgcagcctccgctgcaggccttcctaccacttcatcggcagcctggcggtggcagacctcctggggagtgtcatttttgtctacagcttcattgacttccacgtgttccaccgcaaagatagccgcaacgtgtttctgttcaaactgggtggggtcacggcctccttcactgcctccgtgggcagcctgttcctcacagccatcgacaggtacatatccattcacaggcccctggcctataagaggattgtcaccaggcccaaggccgtggtggcgttttgcctgatgtggaccatagccattgtgatcgccgtgctgcctctcctgggctggaactgcgagaaactgcaatctgtttgctcagacattttcccacacattgatgaaacctacctgatgttctggatcggggtcaccagcgtactgcttctgttcatcgtgtatgcgtacatgtatattctctggaaggctcacagccacgccgtccgcatgattcagcgtggcacccagaagagcatcatcatccacacgtctgaggatgggaaggtacaggtgacccggccagaccaagcccgcatggacattaggttagccaagaccctggtcctgatcctggtggtgttgatcatctgctggggccctctgcttgcaatcatggtgtatgatgtctttgggaagatgaacaagctcattaagacggtgtttgcattctgcagtatgctctgcctgctgaactccaccgtgaaccccatcatctatgctctgaggagtaaggacctgcgacacgcttccggagcatgtttccctcttgtgaaggcactgcgcagcatctggataacagcatgggggactcggactgcttgcacaaacacgcacacaatgcagccagtgtccacatgtgttcacagggccgcagaaagctgcatcaagagcacggtcaagattgccaaggtaaccatgtctgtgtccacagacccgtctgccgaggctctgtgagcctgatgcctccctggcagcacagg

SEQ ID NO: 514 - DNA, 1549 bp, Homo sapiens
  misc_feature 1496: n = a,t,g, or c
cctgggcgtccgtacgtcggagtccttcgtcctccagggtccctgttctttgcgccagcgggaaccactatctctgcactcctggggttttgttacatggctgctttcctcaaaatgagtgttagtgtcaatttcttcagacctttcaccaggtttttggtgccatttacccttcataggaagagaaataacttaacaattttgcagagatacatgtcttccaaaataccagctgttacttatcctaaaaatgagagtacacccccttctgaagagctagagttggataagtggaaaactaccatgaaatctagtgtgcaagaagaatgtgtttcaacaatctcaagcagtaaggcgcagatcctctagctgccaccagagagtgcattgagatgtggagattgcttggcagagaagtaccagaacacatcactgaagaagagctcaaaacccttatggaatgtgtttctaacacagcaaaaaaaaaatatttaaaatatttatatacgaaggaaaaagtgaaaaaagctaggcaaataaaaaaggaaatgaaagcagcagcaagggaagaagcaaaaaatatcaagctgctagaaaccactgaggaagataaacagaaaaactttctatttttacgactttgggataggaatatggacatagcaatgggctggaagggtgcccaggccatgcagtttggacaacctttggtttttgacatggcttacgaaaattatatgaaacgaaaagaattgcagaatactgtttcccagcttttagaaagtgaaggatggaacagaagaaatgttgatcctttccatatttatttctgcaatctaaaaatagatggtgctttgcacagagagttagttaaacggtatcaagaaaaatgggacaaattgcttttaacatcaacagaaaagtctcatgtagatttatttccaaaggacagtattatctatttaactgcagattctcccaatgttatgactactttcaggcatgacaaagtttatgtaattgggtcttttgttgataagagtatgcagccaggcacatccctagccaaggcaaaacggctgaacctggcaactgaatgccttccattagataaatatttacaatgggaaattggtaacaaaaatctcaccttagatcaaatgatacgtattttgttatgtctgaaaaacaatggtaattggcaagaggctctgcaattcgttcccaagagaaaacatactggttttctggagatttctgagcattctcaagagtttatcaacagactaaagaaggcaaagacttaattcattttcaaaaggttctctgaatgtgcacagaacacgtggctcaaatgagaacatttgatggcttaaaaagtaaatgcgttagaaatacagttctgttaatgtatttcttcccaaacaattcatttttctcttctaaaggtagtctttcccaactgactgtagggttgtgtcttttcccaattaaanatctgcagaactttgggattatactttgtttactgtagaaagattggaagagt

SEQ ID NO: 515 - DNA, 2282 bp, Homo sapiens
  misc_feature 676,861,952,975: n = a,t,g, or c
gatctgtggccggcggcagctggtgcggggggcagctgagagcgagaggtggatcggggcggtgtgtggccagggccatgacgggcaatgccggggagtggtgcctcatggaaagcgaccccggggtcttcaccgagctcattaaaggattcggttgccgaggagcccaagtagaagaaatatggagtttagagcctgagaattttgaaaaattaaagccagttcatgggttaatttttcttttcaagtggcagccaggagaagaaccagcaggctctgtggttcaggactcccgacttgacacgatattttttgctaagcaggtaattaataatgcttgtgctactcaagccatagtgagtgtgttactgaactgtacccaccaggatgtccatttaggcgagacattatcagagtttaaagaattttcacaaagttttgatgcagctatgaaaggcttggcactgagcaattcagatgtgattcgacaagtacacaacagtttcgccagacagcaaatgtttgaatttgatacgaagacatcagcaaaagaagaagatgcttttcactttgtcagttatgttcctgttaatgggagactgtatgaattagatggattaagagaaggaccgattgatttaggtgcatgcaatcaagatgattggatcagtgcagnaaggcctgtcatagaaaaaaggatacaaaagtacagggaaggtgaaattcgatttaatttaatggccattgtgtctgacagaaaaatgatatatgagcagaagatagcagagttacaaagacaacttgcagaggaggaacccatggatacagatcaaggtaatagtatgttaagtgctattcagncagaagttgccaaaaatcagatgcttattgaagaagaagtacagaaattaaaaagatacaagattgagaatatcagaaggaagcataattntctgcctttcattatggaattgntaaagactttagcacaacaccagcagttcctaccactagtagaaaaggcaaaagaaaaacagaacgcaaagaaagctcaggaaaccaaatgaagatgttttcagatatgtacacatttctgcttctgcacatattttcatggaaaccattatgtataaagaacttagagcaccatcctaattggctcagtgcacgtttggcaatagtgccagcctgtctgtctttaatgcatggattcataaacttcttcccctacctgcatcatgtgcatgtagtgcatattaaatgaaagtgatattaagaatgctttcccaaattccattatttgacattgagtctgacaactgttagttttctggttgtctaactcccatatgaagctagaaaatgcacaagcgatattccttatctgtaatttaaatacttaaaatttgcaattgtcagatcttgattaaactggttgtcttatttcttctcatcattaacggaaaaaaaatcagtatttctatctttgatatctaagtgttttgaggattttaaaactgaattttatctgctataccagttatttgagaaagtatgattttaatgtaaatcatttaaaaaggacaaaagtataatttccagtgattttcactgctgtcagtagaaaagtaataaacatctcaattttattttagtaaattttcttcaagtgtttggggttatttgtttatgtattagagaattgtttcaggaaggtctgagtattatgcttcaaagcaaaatttcaggttaagaagaaattgtaaatcttaaagaatgttggtgttactctcaatggaatattgtttcaagcttgtaagctgtgtataaaaaaactggaggtctgacagttcatgttatctgcttttttaaaaagatggtagtggtgatgggggtctttctatgccaatttgaataaatttcgtacagcctgcagttttcaagagccatatgtaatttgctcacaattgatttttaaaaattgatttgggagttgctttgtaataatcttctgcttctaatcttcctttgcaagtcagactttaaagaagactttataaagctttcttttttaaaggaagtaacctacttttttctttatcaagaatatttctgaggttgatacatgactttaacattttattatttattgtaaaatcaatttagcataatttattttattagggagaatgtgtacccatcttccagcttcagcacatttttaaggattgtttttaagcttagtaattgtggtattaaatgacttagaactagaacggcag

SEQ ID NO: 516 - DNA, 1417 bp, Homo sapiens
gcctccgcaggcccaaccgccgccagcaccatggccagcaccatttccgcctacaaggagaagatgaaggagctgtcggtgctgtcgctcatctgctcctgcttctacacacagccgcaccccaataccgtctaccagtacggggacatggaggtgaagcagctggacaagcgggcctcaggccagagcttcgaggtcatcctcaagtccccttctgacctgtccccagagagccctatgctctcctccccacccaagaagaaggacacctccctggaggagctgcaaaagcggctggaggcagccgaggagcggaggaagacgcaggaggcgcaggtgctgaagcagctggcggagcggcgcgagcacgagcgcgaggtgctgcacaaggcgctggaggagaataacaacttcagccgccaggcggaggagaagctcaactacaagatggagctcagcaaggagatccgcgaggcacacctggccgcactgcgcgagcggctgcgcgagaaggagctgcacgcggccgaggtgcgcaggaacaaggagcagcgagaagagatgtcgggctaagggcccgggacgggcggcgcccatcctgcgacggaacacgttcgggttttggttttgtttcgttcacctctgtctagatgcaacttttgttcctcctcccccaccccagcccccagcttcatgcttctcttccgcactcagccgccctgccctgtcctcgtggtgagtcgctgaccacggcttcccctgcaggagccgccgggcgtgagacgcggtccctcggtgcagacaccaggccgggcgcggctgggtcccccgggggccctgtgagagaggtggcggtgaccgtggtaaacccagggcggtggcgtgggatcgcgggtccttacgctgggctgtctggtcagcacgtgcaggtcagggcaggtcctctgagccggcgcccctggccagcaggcgaggctacagtacctgctgtctttccagggggaaggggctccccatgagggagggccgacgggggaggggggtgatggtgcctgggagcctgcgtgtgcagccggtgcttgttgaactggcaggcgggtgggtgggggctgcagctttccttaatgtggttgcacaggggtcctctgagaccacctggcgtgaggtggacaccctgggccttcctggaagcctgcagttgggggcctgccctgagtctgctggggagtgggcattctctgccagggacccatgagcaggctgcatggtctagaggttgtgggcagcatggacagtcccccactcagaagtgcaagagttccaaagagcctctggcccaggcccctccgtgggacagccccgccgcccctccccaccagggctttgcagatgtccttgaaagacccaccttagaaaa

SEQ ID NO: 517 - DNA, 1869 bp, Homo sapiens
gcggaaggagcaagagtgggaggcgcgcgcggaggccgcgacggacgcaagatggcgacggcgaccatagctctccaggtcaatggccagcaaggaggggggtccgagccggcggcggcggcggcagtggtggcagcgggagacaaatggaaacctccacagggcacagactccatcaagatggagaacgggcagagcacagccgccaagctggggctgcctcccctgacgcccgagcagcaggaggcccttcagaaggccaagaagtacgccatggagcagagcatcaagagtgtgctggtgaagcagaccatcgcgcaccagcagcagcagctcaccaacctgcagatggcagcagtgacaatgggctttggagatcctctctcacctttgcaatcgatggcggctcagcggcagcgggcgctggccatcatgtgccgcgtctacgtgggctctatctactatgagctgggggaggacaccatccgccaggcctttgccccctttggccccatcaagagcatcgacatgtcctgggactccgtcaccatgaagcacaagggctttgccttcgtggagtatgaggtccccgaagctgcacagctggccttggagcagatgaactcggtgatgctggggggcaggaacatcaaggtgggcagacccagcaacatagggcaggcccagcccatcatagaccagttggctgaggaggcacgggccttcaaccgcatctacgtggcctctgtgcaccaggacctctcagacgatgacatcaagagcgtgtttgaggcctttggcaagatcaagtcctgcacactggcccgggaccccacaactggcaagcacaagggctacggcttcattgagtacgagaaggcccagtcgtcccaagatgctgtgtcttccatgaacctctttgacctgggtggccagtacttgcgggtgggcaaggctgtcacaccgcccatgcccctactcacaccagccacgcctggaggcctcccacctgccgctgctgtggcagctgctgcagccactgccaagatcacagctcaggaagcagtggccggagcagcggtgctgggtaccctgggcacacctggactggtgtccccagcactgaccctggcccagcccctgggcactttgccccaggctgtcatggctgcccaggcacctggagtcatcacaggtgtgaccccagcccgtcctcctatcccggtcaccatcccctcggtgggagtggtgaaccccatcctggccagccctccaacgctgggtctcctggagcccaagaaggagaaggaagaagaggagctgtttcccgagtcagagcggccagagatgctgagcgagcaggagcacatgagcatctcgggcagtagcgcccgacacatggtgatgcagaagctgctccgcaagcaggagtctacagtgatggttctgcgcaacatggtggaccccaaggacatcgatgatgacctggaaggggaggtgacagaggagtgtggcaagttcggggccgtgaaccgcgtcatcatctaccaagagaaacaaggcgaggaggaggatgcagaaatcattgtcaagatctttgtggagttttccatagcctctgagactcataaggccatccaggccctcaatggccgctggtttgctggccgcaaggtggtggctgaagtgtacgaccaggagcgttttgataacagtgacctctctgcgtgacagtggtccctctccccggacttgcacttgttccttgtttcctctgggttttatagtgatacagtggtgtccccggggccaggcgcgctctgcccagcccagcctacagtgcggataaaggtgcggatgctgctggcc

SEQ ID NO: 518 - DNA, 355 bp, Homo sapiens
tttttttttttttgttttgtggtggtgggttgctcgtaattcacagtgccggcatcaaactgcttcttgcgcttgggctctggaggttctggaatgccgtacttctcccgtctttctgcagctcggtctcggtatttcatctctctctcccttagctccaaggcttccagctcctgctcgctcagcctggatcgtcggtagatgtccatgttttgcttgtgaaggtctgagagttgctggtgcctgactagggcatctttgttcgggaactggcgccggcagagcagacaggccatcttcttccagtcagctagcttctcttcctcactctcaagtctctccaccaccacgaaac

SEQ ID NO: 519 - DNA, 975 bp, Homo sapiens
tttttttttttttttgagacagtctccctctgtcgcccaggctggagtgcagtggcactgcgatcttggctcaccgtgacctccgcttcctgggttcaagcaattctcctgcctcagccttccaagtagctgggattacaggcgtgtgccatcacgcctgggtagtttttgtattttcagtagagatggggtttcgccatgttggccgggctggtctcgaactcctggcctcaggtgatccactagcctcggactccccaagtgctgggataaaaggcgtgagacaccacgcccggccatctgtctactcttttccccaacatcctgtaattatgaaaaatgttaaaaatacatacagaaggttgaaaaataatgtaagaattatgcatttacatatcacttagattcaccaattttaaatatttttgctttatatataaaaatataaatatatatgcatctatacatttttcctatttgaaagtgagtttgaaacatcataaaacttgacccctaaatcctttagcctgcatctctcctaaagtaatcacaaaagcattgtctcattttctctataaacctcctccaaattaggtgtcacacctagaaaaaggctctaccaacatttcttttggtaagttcaccaatgatatggtttcattagagcaccagagacatttccacagctgctgactccctcagccttgaaatatttttttcacttggcttccaggacaccctgctctctaggtagcccctcaatattttcttttctttttttttttttttttttttagagacagagcaagactctgcctcaaaaaaaaaaaaaagaaaaaaagaaaatttacgcaggctggggcacagtggctcaggcttgtaatctcagcactttgggaggcagagacaggaggatcgcttgatgctaggagttcaagaccagcctgggcaacatagtgagatccctgtctctac

SEQ ID NO: 520 - DNA, 862 bp, Homo sapiens
tgaaggtgtgtgcctgtggtgtgtgggctgctctaggagcagatacaggctggtatagaggatgcagaaaggtagggcagtatgtttaagtccagacttggcacatggctagggatactgctcactagctgtggaggtcctcaggagtggagagaatgagtaggagggcagaagcttccatttttgtccttcctaagaccctgttatttgtgttatttcctgcctttccgagtcctgcagtgggctgccctgtaccctgaacctcatgagcctctaagggaaaggaggaacaattaggacgtggcaatgagacctggcagggcagagtacaagcccagcacccagtgtcccagccttactgggtccttaccctgggccaaacagggagggctgatacctccttgctcttcctagatgcccacctcctacaatctcagcccacaagtcctctccaccctagggggcttgctgcatggcaataactcataatctgatttggaggtttgccctttacaggggcagattttctgtctcagttcaacaatgaaatgaagaggaactccctctttctacagctcacttctatcagaggcccaggtgcctcagagccacattgagttgctttttctgggatgaggaagtagggttaaactccccagtttcctgagggaggctcctgacaggtgccctttgtcagaccctaccacagcctggataggcagccacattggtcctcgcccttgctcggcactccgtggtggtcctgcccttctccctgcatgcctgtgggtctgctctggtgtgtgaaggtcggtgggttaactgtgtgcctactgaacctggcaaataaacatcaccctgc

SEQ ID NO: 521 - DNA, 2160 bp, Homo sapiens
acatagacctgtttctcgactgttaacagatgggatcatgagagttggatctactgcatcaaagaaactatcagaaaagttggtagcagaatggttttctcaggcagctgatggtaacaatgaagcattttctaaactcaagctttatgcacaagtctgcagatatgacctaggtccttatcttgcttccctgccattggacagctctctactttcccagccaaatttagttgcccctacaagtcagtctttgattactccacctcagatgacaaatactggaaatgctaatactccatctgccaccttagcatctgcagcgagcagcactatgacagtgacttcaggtgttgccatatctacttcagttgccacagctaattcaactttgaccacagcttcaacttcatcttcatcatcctccaacttgaatagtggagtatcatcaaataaactaccttcgtttccaccctttggcagtatgaacagtaatgctgcaggatccatgtctacacaagcaaatacagttcagagtggtcagctaggagggcaacagacatcagctctacagacagctgggatttctggagaatcatcttcacttcccactcagccgcatcctgatgtgtctgaaagcacgatggatcgggataaagtgggaatccccacagatggtgattcacatgcagtcacgtatccacctgcaattgttgtttatataattgatccttttacatacgaaaatacagacgagagcactaactcttctagtgtgtggacattggggctacttcgatgctttctagaaatggtccagactcttcctcctcatatcaagagtactgtttctgtacagattattccttgtcagtacctgttgcaacctgtgaagcatgaagatagagaaatctatccccagcatttaaaatccctggctttttcggcctttacccagtgtcggaggccacttccaacatcaaccaatgtgaaaacattgactggctttggtccaggtttagccatggaaactgcccttagaagtcctgatagaccagagtgtattcgactttatgcacctccttttattctggctccagtgaaggacaaacagacagagctaggagaaacatttggagaagctggacagaaatataatgttctttttgtgggatactgtttatcacatgatcaaaggtggattcttgcatcttgcacagatctatatggagaacttttagaaacttgtatcattaacatcgatgttccaaatagggctcgtcggaaaaaaagttctgctagaaaatttggtctacagaaactttgggagtggtgcttaggacttgtacaaatgagttcattgccatggagagttgtaattggtcgtctaggaaggattggtcatggagaattgaaagattggagctgtttgctgagtcgtcgaaacttgcagtctctaagtaaaaggctcaaagacatgtgtagaatgtgtggtatatctgctgcagactcccctagcattctcagtgcttgcttggtggcaatggagccgcaaggctcttttgttattatgccagattctgtgtcaactggttctgtatttggaagaagcacgactctaaatatgcagacatctcagctaaataccccacaggatacatcatgtactcatatacttgtgtttcctacttctgcttctgtgcaagtagcttcagctacttataccactgaaaatttggatttagctttcaatcccaacaatgatggagcagatggaatgggtatctttgatttgttagacacaggagatgatcttgaccctgatatcattaatatccttcctgcttctccaactggttctcctgtacattctccaggatctcattacccccatggaggtgatgcgggcaagggtcagagtactgatcggctactatcaacagaacctcatgaggaagtacctaatattcttcagcaaccattggcccttggttactttgtatcaactgccaaagcaggtccattacctgactggttctggtcagcatgtcctcaagcacaatatcagtgtcccctttttcttaaggcctctttgcacctccacgtgccttcagtgcaatctgacgagctgcttcacagtaaacactcccaccaccacgaaac

SEQ ID NO: 522 - DNA, 2008 bp, Homo sapiens
agggcccatctgggcaaggcccccagcgcctgccttctctcccggggccctgtgggcaagcctcctgcttcactttcaggtttctcgaagtgccttcttgctcctgtctgtttccccatcctgccagatttctgtttctcttgctgggcttttggcagtagggggctgtgttggtgggccctacgaagatgctcagtgctcgagatcgccgggaccggcaccctgaggagggggtagttgcagagctccagggcttcgcggtggacaaggccttcctcacctcccacaagggcatcctgctggaaaccgagctggtaacagctgcctcccaacctggtgcctccatctccctgacccccggctcctggccagccttatgccagcccccagctcacccttcagtagcctccttccccaagccctctggacacctctcctgcccgcagctgccccttcttcgtctcctactctgccttcttgctgcctctccacccggagacatttacagcaggtttcagttgcagcaggaaggactgcagttagacagggtgactttttgggacattgaggaagcttgagacatagggatgggacaggggcaatgacagcctctaacatggccacttctcagcacgtccaagaagtctaactatcaaaaagggcagacttcctgcaactgcactttatctgtggtctgctgcccagaaacatctcttctcaggaaaggatcttcccctggttacttagcaagaccacagtgtagagttaaggcctctgcacgtatgccaacctaggtcatcagagctaaaggggctcccagaaaccactgggcagcatctgccttctctcttggcatggaatcaaaggctctggtccttgtcagggggctttcaggcatctgggggtggggaaagcattatgaggcagggggctcctcttggtccctgtggagtcgggtctctgtgggcacaactccaggggctggcattcacactgtacctatgaattactgtgggatagtgctcctgggagccatatggcttggccagactgctggggttgctgggtgagcagagtgggaggccggagactgcccttgaccggcaaatgccctgcaacggtggctcctgacaccaggggatagggagatgtgccagagtccttcctcccctccaaggacaggtagtaggtgccagcctaggggagcttccaaggaggggaaggcaaagccctggcccctgcctgtgtccccttcttggcatgttccacatgctcggtcctgcaggccctgaccctcatcatcttcatctgcttcacggcctccatctctgcctacatggccgcggcgctactggagttcttcatcacacttgccttcctcttcctctatgccacccagtactaccagcgcttcgaccgaattaactggccctgtctggacttcctgcgctgtgtcagtgccatcatcatcttcctggtggtctcctttgcagctgtgacctcccgggacggagctgccattgctgcttttgtgagttcagccctgcaggactccttagcccctcaagagctcaggctggtgcttgcacactttctgtatcagaagccacagccaggacttggggttctggcttgcacctcaccctataccttaacccaatggccctatagcctctgttttgccatccccactcccactcccacaggtttttggcatcatcctggtttccatctttgcctatgatgccttcaagatctaccggactgagatggcacccggggccagccagggtgagtgcctgtgctctgtggagaggagatgccctccccaccctagctacccatcctgatgtgggtccctacctggctctatcctcacaggggaccagcagtgactctggggctacctggctcctaggcccagccagccagagaggacagtggagcccagacacgtctccttgggattcactagcccccagcccgccaaaccccaccaccacgaaac

SEQ ID NO: 523 - DNA, 1666 bp, Homo sapiens
ggtgcacttcgaattggagctgatttcttagcgcgttggtacaatggaacaaacaacaagaacacacctgtctatgtgtcctcaccaacctgggagaatcacaatgctgtgttttccgctgctggttttaaagacattcggtcctatcgctactgggatgcagagaagagaggattggacctccagggcttcctgaatgatctggagaatgctcctgagttctccattgttgtcctccacgcctgtgcacacaacccaactgggattgacccaactccggagcagtggaagcagattgcttctgtcatgaagcaccggtttctgttccccttctttgactcagcctatcagggcttcgcatctggaaacctggagagagatgcctgggccattcgctattttgtgtctgaaggcttcgagttcttctgtgcccagtccttctccaagaacttcgggctctacaatgagagagtcgggaatctgactgtggttggaaaagaacctgagagcatcctgcaagtcctttcccagatggagaagatcgtgcggattacttggtccaatccccccgcccagggagcacgaattgtggccagcaccctctctaaccctgagctctttgaggaatggacaggtaatgtgaagacaatggctgaccggattctgaccatgagatctgaactcagggcacgactagaagccctcaaaacccctgggacctggaaccacatcactgatcaaattggcatgttcagcttcactgggttgaaccccaagcaggttgagtatctggtcaatgaaaagcacatctacctgctgccaagtggtcgaatcaacgtgagtggcttaaccaccaaaaatctagattacgtggccacctccatccatgaagcagtcaccaaaatccagtgaagaaacaccacccgtccagtaccaccaaagtagttctctgtcatgtgtgttccctgcctgcacaaacctacatgtacataccatggattagagacacttgcaggactgaaaggctgctctggtgaggcagcctctgtttaaaccggccccacatgaagagaacatcccttgagacgaatttggagacttgggattagagcctttggaggtcaaagcaaattaagatttttatttaagaataaaagagtactttgatcatgagacataggtatcttgtccctctcactaaaaaggagtgttgtgtgtggcggccacgtgcttctatgtggtgtttgactctgtacaaattctagtcccaaagatcaagttgtctgaaggagccaaagtgtgaatgtgggtgtcggctgcggcattaaattcatcatctcaacccagagtgtctggtctccctgctctttctgcatggttgtgtccctagtcctaagctttggttctttagggtgactgtggtaagaaggatatttaatcatgacatgcacggacacgtacatatttaactgaaacaagttttaccaaacagtatttactcgtgatgtgcgtagtgcattctgatatttttgagccattctattgtgttctacttcacctaaaaaaataaaataaaaatgttgatcaagaaaaaaaaaaaaaaaaaaaaaaaaaaaaaaaaaaaaaaaaaaaaaaaaaaaaaaaaaaaaaaaaaaaattccccccc

SEQ ID NO: 524 - DNA, 1933 bp, Homo sapiens
agaacagtgcctagcacctaataaacctccagtgttagctaatttgttattctaggagaattttagatgtcggttctttgacaatgacccatcacatactctgagatcatttctaagtcaccattcaagctccttccccgaagtgtgttccatagaacactgggaccatgagatgctctattagaaagggtcagggtacggttccatggtcagagaggtttggaaaactgttctggcctcagcccttggcagcatgtgcagattccaggcaccgaggcagggctggaggagtaagtggctttgcaataaaatgggtgctggagtctaaaatgataccctgggtggagtgggggagctgagcaggaggccaggtggcaaccagtagctgctgggcccgtggcctgaaccctcctgcactcctccagctggagtctcaccgcggatcccaggaatacctgctgttcccacagggctgcctttccgtagtttgtctggagacaccaagagtggtttccatgcctgctgggaataggctgagcatgcaatgacatgagggccaaggcttgtgggaaaatgacagcttcacagccccttgaggagtgaccaagccacaaagtaaatcctaaagccacaaccccttctaccactgagctgctggaggtgggtccttatttcaagccatattcaacccaccccacaaaacctaacattgaggtggtgggcacacggcccctgccgtgggggctcactctgcagctggagagacagcatacctgaaacctgcaaggaaccggtttataaaacaacagaacagccaggaaaatggtgctaggagagacagtggagaggccagagaagcaaaccactgtggctcctcactgggggtttcacggggttggactgagccctgtcacctctgtgatagtcttcactctgacaggcaatggtgactgtgtgtgtttcctggggaggaggttagcaaggaccgttgcctttcctgggaagggcggtttgcagaaccacgggtttatattgcacggagtgtattttctgaattctaagtcagaacgagcatctgatacacgatccatggctgggtcacttctgggtgcaagaagctttctagaccttagacactcaagattacggtcccgggccagtaacagcgcctgggagcttgtagaaatgcagaatcttagcctaggcaacataggagacctcatctctgcaaaaaataacaaaattatgcgggcatggtggtgcacacctgtgtcccagctattctccaggctgaggtgggaggatcgcttgaagcccagaggtgaggctgcagtgagcgatgatcgcaccactgcactccagtttaggccaatacagcgagaccttgtctcaaaaaaagacaaaaaaaacaaaaagaaatgcagattcttgggccccaccacccgacgcctactgagcgagattctctgggggtgggcccacgccatttggcttttcacaagttctccaggtcattcttgggcacgatcaaatttgagaatcacaggtctaggatacgacggggaaaacagaaatgtggggtggtcagggacattcggataattcgggctatttgtattcaggtgtgagctggcaaatccgagacctgttttgcgtagctaattaccagcaatgacaaactcccaggctctgaggcccaagcctcctgggctgcaactggtctttatttttggaggcaatgaatggagcacctcggcctgggaccctcagtgtagggttttctgactcttaggcaacttcctagggtgctgtacttcctttttaaagttggggagcggcagggggagggggaagtgccacgcccttgtagtttcatgatgtcatgttgcatgtgctcttgagctgtaaataaagagacgatggttaaaaagcc

SEQ ID NO: 525 - DNA, 2012 bp, Homo sapiens
atttaaggtggaggtgaatgtaatccacacggccaaccccatggaacacgccaaccacatggctgcccagccacagttcgtgcacccggaacaccgctcctttgttgacctgtcaggccacaacctggccaacccccacccgttcgcagtcgtccccagcactgcgacagttgtgatcgtggtgtgcgtcagcttcctggtgttcatgattatcctgggggtatttcggatccgggccgcacatcggcggaccatgcgggatcaggacaccgggaaggagaacgagatggactgggacgactctgccctgaccatcaccgtcaaccccatggagacctatgaggaccagcacagccgtgaggaggaggaggaagaggaagaggaagaggaaagcgaggacggcgaagaagaggatgacatcaccagcgccgagtcggagagcagcgaggaggaggagggggagcagggcgacccccagaacgcaacccggcagcagcagctggagtgggatgactccaccctcagctactgacccgtgcccccggccacctcggtttctgctttcgaagactctgctgccatccgttctcccagtcccaagggtccacgatgtacaaagtcatttcggccagtaggtgtgcagacccctccccgccacgatcgtcgctgtgcttggtgtgtaggaccctaggctccccgcccaccctctgcctggtcgcgctctttagtcccacgaggagctgacacgtcctctctggccgccatccggctcgcacaggggcctcccagcgcctcaggccccgcgtttgtgtctggagtctccccccggggagaggacactggcccctcgcactccagaaaagccatgccagctgggctcgttgacaaagggtaaaacatgctcactcccacccggtaatcatttttttctttttttaaaaaaagtttttattttttccaaactagtgcatgtataaataatggcaggatggggggtactgtgtagatgattaactgactttttaatattttgtaataaatcggattccttgtgtcctttgtgctagtgtaacccgggactggaatgtaaagtgaagttcggagctctgagcacgggctcttcccgccgggtcctccctccccagaccccagagggagaggcccaccccgcccagcccggccccagcccctgctcaggtctgagtgtggctgggagtcgggggccacaggcctctagctgtgctgctcaagagactggatcagggtagctacaagtggccgggccttgcctttgggattctacctgttcctaatttggtgtggggtgcggggtccctggccccttttccacactcctcctccgacagcagctcccgtgggcagtggcctggtctcaccgtgtgcagccttgtggtttatgcttaaatgtacattttcctgctggtaaaaggagaaactgagaggtgtcctgcagaccggctgaccactccttttggagacggcaggaggcgtgagcgatctgtactcagaacgtccaggagagacgcgtggcccgaagtcaaagtgctggaatttccaaaacagcctgttctctcctctctcctccccagagcaccccctgccatccaggggggttgaaatccctctcccccaggagccctgctgctttgcttggtggtagggcaggagagcaaacaaacagtcatggtctaaaacccacatagcactttgctcttagttacatgtaaaattttagatttctaaaacaggtgggcaatcattttgaatactgttctgtgaccctgactgctagttctgaggacactggtggctgtgctatgtgtggccatcctccatgtcccgtccctgtggctgctctgtttagacagcggacagacgctcacgcccaggggatgtcctaacgctgtcgccgcgcggtttcccttcgcagatgtgtatactcatgataggtcagaaagtgtatccgctacaataaagttctggttctaacc

SEQ ID NO: 526 - DNA, 1451 bp, Homo sapiens
agcaaacaaaacctcccaagagttaacattaactgagcatacattaaatggtaagtgtcacacactgttctatgtatgcatagctcagtttttaacttaggaagtaaattctaataatattccttatttttttctgatggggtaattgagggcagctactctcagtaacattgaacccgatagcacatagtgaagactcattatctttatcaatgatgtgtcagttggaggtaaaaattaggtccttttcaatatccagtggtgactgtgctcctaggaagatcagccaaggatacacagtccgaaaagtttatagcttaggtaggtaggattaagtgcagtgcctctctagtacacacctggatgtgactcttgtgtccacatgtttttcaaacctggcaggaacaataaccccattcagaaatgacttctaaaaaggctatttttgcgggcttgcaggcatgcacttgtagccctagctactcaggagggtgaggagggaggattgcttgatcccaggaattctgagctgtagtgagctatgccgattggattcctgcactaaatttggcatcaatatggtgacctcccgggcacgggggatcaccaggttgcctgaggaggggtgaaccagcccaggtcgggaatggagcgggtcaaaactcccgtgatgatcagtagtgagatcatgcctgtgaatagccattacacttcagcctgggcaacatagcaagaatcaatctcgctctctctctttttttttttttttaaagagccaaccttaggaagaaatgccttttttttttttctttttaaaggacatttcttctaaggttggcttgttttagggatagccaaccctacaggttgttctaattgatatactcatctcaccaacactaatgttactattgtttttattacatttcaaagaggtcatcaaatcaataaaagttcagaacttggcaagatggctcgccagtaaattctagactttctctttgcacccccatgtcttacaatgcaagaatgtaaccaaatctcgataatttcaaagttgtcattaatttcgtaagcctaatataaacaaatatttgtattatttttgttagcaggaaagagtgattaagtgaggttatttacccctaaatggtccattctgcattgtatttcaggctggaaatgaattattctttaccagttttgaaacactttgaaatatcctaaggtaacttggaagctgtgtagtatatcaaattaatttgctacctaataacatagaaagtaaatatctttgtggtcacccacattgggtgagacagaaaatgaatctgttctaaaatttgtaatttgctaacttgatttgagttagtgaaaactggtacagtgttctgcttgatttacaacatgtaacttgtgactgtacaataaacataagcatatggtaccgg

SEQ ID NO: 527 - DNA, 1703 bp, Homo sapiens
  misc_feature 708-710: n = a,t,g, or c
tgcagcaccatgtcctgcctatccaggccaggctgggcagcattgcagagattgacctgggtgtgccgccgcccgtgatgaagaccttcaaggagtttctcctctccctggatgactcggttgatgagacggaggccgtcaagcgctataatgactacaagctggatttccggaggcaacagatgcaggatttcttcctggcgcacaaagatgaggagtggtgagtgcccctacttccctggacctctgccctggcatgtcccctggccccgctggtggagccacagccctgtcctcttcccagttttccctgtccagaactttctgggggcgggggtcgggaagtatgacagcattggctgatggggtctccccctcacttcagcaactgccacggcccccgccccgccctgtctcctgtcctgctgtcctcagagagtgggacacctccaggcagcaggccagagccacttggccccttggggcagcagacagactgcttcccacttgttggtgttgggtcattgtcatccctgatcaccaggaccctgtgtggctgtggcgtctcctaaagcgacgagtgaatacagacaagaaaagcaaagatctcggtcgtatgacagaaaagattttaatttttttttcttttgtggatgttttaattataatcaaccatcttttcccccttctgctctctctctcatctcnnntgtctctctgaaagagcaaaaactggaactacacccgctcatcgacggagctcggagcaaaccacctccacccccaccatacccagcccatacatgagcccctgggctgagctgcgcgcccccggccaggcagacaggccagggcactgctgtgcacaatgcagcggtttagctgaatgtgattgctcaggcagctagccagtcaggccccactgcggagtcccgcgtgggcatctcggccgggcgcccagccaggagccagccggtggcccaccagccagcatgggccctgggcgccgctagttaaatcttgagctctgtttgaccaagcggccaaggtttcggtctaagtaccaacccagatgaggtggggaagcgtcggcaggaggcccggggggccctgcaaaaccgactgagggtcttcctgtccctcatggagactggctggtttgataaccttctcctggacatagacaaagctgatgccattgtcaagatgctggatgcagccgtgattaagatggaaggaggcacggagaatgatcttcgcatcctggagcaggaggaggaggaggagcaggcaggaaagcctgggagcccagcaagaaagaagaaaggacgggctggagcaggcctaggggacggggagcgcaaaaccaacgacaaggatgagaagaaggaagacggcaagcaggctgagaatgacagttctaatgatgacaaaacaaagaagtcggagggtgatggggacaaggaagagaagaaagaagactccgagaaggaagccaaaaagagtagcaagaagcggaaccggaagcacagtggtgacgacagctttgacgagggcagcgtgtcagagtctgagtcggagtcagagagcggccaggctgaggaggagaaggaggaggccgaagaagcgctcaaggagaaggagaagcccaaggaagaagaatgggagaagcccaaggacgccgcggggctggagtgcaagcc

SEQ ID NO: 528 - DNA, 1684 bp, Homo sapiens
  misc_feature 850: n = a,t,g, or c
gaacctttattattttttcattacattgcagaatatatgtaaaattgaaatgatattatttgaggcatctgaattactgaatcatcagctaggggtacatcctatttccaaagactgggtcagggccaaggttatatttctgatatcatgatctctaagatcttgtttagttctaacattctgtagttctatgacaattcctctcaatgaatactgtatcctaacctttctctcaccctactgcccttttctttcacctcctgctcagtctgactgccctccattactaagctgcattcttcattttgactacagaacacacattattttaagagaaaataattggtttctaactgcaggtgtagtaattggcattcactacagtctttagccagttggggtagttgtgacattataagcagagagcttgacctctgattccagagaacaaaagacctggcaaagagactgtttctatgcaaaaagttaaccttgtatggacagaaataggagacaaggatagcaggaagtaggcagcctaaaatgcaaggaattggattttgcctccaagacttaatgttttatgtagggtcttcttccctaaatgtcttgaatattagcaaaccccaagggtactcacaaacacaaaacgctaaaaagaaaaaataaataaaaacccttaaaactagcttaatccacttatgcattttcttttttctttttttctttttggagagtgtgttttgctctgtcacccagaatggagtgcagtgacacgaacatagcctccaactcctggcctcaagccaccctcctaccttggcaccccacaatgctgagactataggtntgaactaccatgcccagcccacttatattataccattttttttaattgtactttaaagtttgggatacatgtacagaacgtgcaggtttgttacataggtatacatgtgccatggtggtttgctgcacctatcaaccctccatctagcttaaggcccgcatatgtatcctaatgttctgcctacccttaacccccaccacctgacaggccctgatttgtgatgttccccttccctgtgtctatgagttcttattgttcaactcccacttatgaatgagaacatgtagcatttgattttctcttcctgtgttagtttgctgagattgatggcttccggcttcatccatgtccctgcaaaggacataaactcattcttttttatggctgcatagtattccctggtgtgtatgtgccacattttcattatctggtctatccttgataggcatttggttggttccaagtctttgctattgtaaatagtgctgcaataaacatatgtgtgcatgtgtctttatagtagaatgatttataatcctttgggtatatacccagtaatgggattgctgggtcaaatggtatttctggttttagatccttgaggaatctccattacagttggcgattcctcaaggaagacattccacaatgtcttccacaatggttgaactaatttacactcccaccaactgtgtaaaagtgttcctatatctccacagcctcgccagcatctgttgtttcttgacttattaatagtctccattctaactggcaagagatgcacttataccattttttgatgaagatgatgtctaataaatctgtgacaaaaag

SEQ ID NO: 529 - DNA, 1427 bp, Homo sapiens
tgagaacaggatgccccaagtaggggctctaccacaggcctaacaggtaccaggctgcgtcacctcattccccagaggagccaagagcggaggctgcccagagtgtccagcacggtctctccccttcaggaacatgacatcgagacaccctacggccttctgcatgtagtgatccggggctcccccaaggggaaccgcccagccatcctcacctaccatgatgtgggcctcaaccgtaagtgcagcccagcctcagtcagccctcctctgcctcccatcagccagagcggtgaggccccccaccctccccacagggccctgtcagccccactcacactcacctctgttgccttcgccctccgggcctccatttccccgacggaccgaggcttacacttctgccttgcctgccctctgggggcccggccttccttccagtcccccggcccctctgctcagccatagtggaagtgtgtctttgcagacaaactatgcttcaacaccttcttcaacttcgaggacatgcaggagatcaccaagcactttgtggtgtgtcacgtggatgcccctggacaacaggtgggggcgtcgcagtttcctcaggggtaccagttcccctccatggagcagctggctgccatgctccccagcgtggtgcagcatttcgggttcaagtatgtgattggcatcggagtgggcgccggagcctatgtgctggccaagtttgcagtgagtctccccatgcccccattaccccaaacaccagggcaagccagggatgtcccagtggtggggactggggggaacccttcagccttgaggaagtgtccctgctcttgcttctcctcctcccacctcctctttatgtagaaaacctcttttttcttttttcctccagggaaattaacttttttaaaatagaggttcctttctccatatagttttctcaagagactagaaactataacttgcttaaactattatccaaagccagaatttctagtagcaacaaactatacaactaactgctctagccactaaataaggatcgtccttcactaattgccatggtatttcaacatgaataatttttttagcaaaaaattttattatggttgggaggtttaaagaaggcacatttcaaaaacatcattgtcggtggctcacgcctgtagtcccagcactttgggaggccaaggtgggcagatcacgaggtcaggagatcagggccatcctggctagcgcggtgaagcccagtctctgctgaaaatgcaagaaattggccgggcgtggtggcgggcgcctgtggtcccggctgctcgggaggctgaggcagaaaaaaggcgtggacccggggggcggagcttgcagtgggctgagatcgcgccactgcactccagcctgggcaacggagcgagactctgtct

SEQ ID NO: 530 - DNA, 431 bp, Homo sapiens
gtcctgtaactgtccccgaggggattgagcagaagctcgggtatgagccctgaggttgactgccggttatttttctgtcctgggaacagcctgacccacctccctgtctccatgtagccagtgaggggagggggagacacagaaccaaccacagccaggggcgtccccatggcgactgtggcccggcccctcctctcttgcctgactctcctctcttgcctgactctagacactaacttagttccaggttcggtgccctgttggtgctcctgtttccaatagcttaggtcccatggtgggggaagaacctcaggggctatgcagcccccgccagctgccctcgaatcccgtccaggccaattccagattctaaactgatttttttcatgatattgtcaaaacagtgaggaaacattaaaaaaaaaagcccc

SEQ ID NO: 531 - DNA, 774 bp, Homo sapiens
  misc_feature 378: n = a,t,g, or c
ggtacttgtgccacattttatcagagttcttatgtacagtatggtgaagataagtgacaagcacacatttttcttgcttcactgctgttctatattacacaggtttgttgttgttttttttaaaaaagaaattaagcagtagttagtctctaaaaatacaatgtttcaggctaccacagtgaataaatagaaatgtaatcagggattaaaaaaaaaacttatgcagcttttcaaagttgattgtttcaaaattggtgtttatttaaaataagtggtaatgtacttgaatgcactttttatgacaatgattcagtaatggtaattttactattaaagaaagtgaaaggtttagttttgttagcatggctcagcatgtanctgtcaggtgtttttcacctaagggcaaaagaaaatgatagtaataattgcagtagttgtattgtattgtatttttgcacgtgtggtaagcataggcttgaagaggtgggtaggcaggtacatgtacttcctaaatttggagataattatctttctgtaagttcgttatgcttgactgtttccatgttctcccaataatgattttatagttacttatcactttactcatggagaattaaaacgtaatgtttttcaactgtatctttctttaactggataatactgctatatgatatgcttactacagactgcattaattcacgaaacgaattctgttatgctgtaatttgaactctcctcaccacaacttattaaaaaaggcaccaatagtttccc

SEQ ID NO: 532 - DNA, 1458 bp, Homo sapiens
atttcttcttaatcctgattttcttggtaagcttttttactttattatactctataatttattatctctatccatatttgtggatcgggtagtgggaaaagagattataatacttgtctttctctcctctccctccatccctcaaaagatctttatgcatttcccactactcccttactgtcttttagcattcagagcaaaaagccaacttgcttaaagaggaatcacttaaaaggtaggcatatctaagatgctcatagaagaggaagaatgggacatggccccatgcttatttttgtttacaacgtaacatggcatgagagagggcagagaaactaagttgctggggaaagttagaggaactgaaagtttgggaataggctgaccacatattatgccagtgaccagtatgacaggagatggggccctgctgccagtcatctccactgaataaagaataatgctcctctttcagggtaataaagtggggaaaaggaacgtcttctcaatgcaagaacataagctttctcgtatatacctgtatgctacagtttttcacatggaattccgttttctgaggtacagcacattttaggtaacagtatttaacttgaaattcatcatgggagtctgctgctataccaggcacaagataaaactccaaaatttctgtttacattgacctttacatttaaagctgttcatccatggtgcctccccaaatcataagaccaaagaccaccaaacgcagggtggactctgctcattattctttgacccagaaagactggagaaggtatgtgctttaagtgctgctctacctgaaaagaaatcctttaaattacctatggaagtgatgtcctcagataatcttaatgactattttggcatttataaatagaaatgattatggactttgatctgccatgcggaggttcggagcctggagaacggctgtgataagtaggttttgattgagtgaaagcatgagcttgttcagagtgaggggcatagtgaaaaaggaacagccatgcctcaaaatcaaatcatttgcattcccacagcatcctgaataccgactacctcttcacttgctaaagcagctaaactgtgaagctctaagtggtttgggtttgttgtttaaccctagcgagatcctttaactgcagcaatattcaagccagatatttggaagcaaatgatatttcctcttgcagtgtccacaatctgaatattaggggcatgaaattaggcttaccatctgatttgtaattacaattttggaattctctgttttagttgctgaggcctgagttttctggctcttaaagcatagatcatttcacctgatgtttttgaagcatcctaagtacagtagagtagaaaactgatttctttgttaattgtacactgaataatgccttttaaaaatcaaaataaaattaacaaataatggtg

SEQ ID NO: 533 - DNA, 2924 bp, Homo sapiens
ctgagatttctccgagccaggaagtttcaccaagcggatgcctttagactcctggctcagtatttccagtaccgccagctaaacctggacatgttcaaaaacttcaaggcagatgatcccggcattaagagggctctgatcgatgggttccccggggtgctggaaaaccgagaccattacggcaggaagattcttttgctgtttgcagccaattgggatcagagtaggaactccttcacagacatccttcgtgccatcctgctgtcattggaagtcctaatcgaagatccggagcttcagataaatggcttcattttaattatagactggagttatttttccttcaaacaagcctccaaactgacaccttcaatccttaaactggccattgaagggttgcaggacagctttcctgcccgctttggaggagtccactttgtcaaccagccctggtacattcatgccctctacacactcatcaagccatttcttaaagacaagaccaggaaacggattttcctgcatggaaacaatttaaacagccttcaccagctaatacaccctgaatttttgccctctgaatttggaggaactcttcctccttatgacatgggaacttgggcccggacgttactcggtcccgactacagcgatgaaaatgactatactcacacatcctataatgcaatgcacgtgaagcatacgtcctcgaatctggagagagaatgctcacccaagctgatgaaaagatctcagtctgtggtagaagctgggaccctgaaacatgaggagaagggagagaatgagaacacccagccactcctggctctggactgaaccctgagtcaccccaatgctcctgcacactggccttcagtggtatcagccacccaggaagcacatgcacaactgacccatgcagacacgtgtgttctgcttgacacaaggtcctccactcctgaacccctgcagtgactgtcaccagccatcggtctgagcagccaaagttggacaaagacttgagagatgctttttttttcccccagtgaggggactggaggatgatgcaaggcatttatgtaaaaaagattctccctcctttcatatttattgtagtaaattgaaaaaataaagactaaatttgatggacacactgcattaggacaagaatttttctgaggtatcacacagggaccctctccagtttttgaaaattaagtgcatttccaagtaaatgtatcagagttaaactgtacagacaccactgtcaagtttcatgtagtacaaagccctgagacaatagtatctccagtaatttccattcttactgaattatttcctttgacctcatcaccagcatcgaattgttcagcctaagagcatgttctcataggtctgggtatttgcaaaagtttgcttattttgatgatatcctgcaaaaaattattttgatgtcacatctcttgtcaggtcactaagctgactgtcatgagctgacgttaaaggaagacacatggacgtgaaatacgattatttcatctgagcattgtgagttccacaggcagctcaaaagcccattagtgcagcatgtgtctgcagaggagatgtctcatgaaaatcacatgtcagtgattaatgaatccattccagttgcctcaactgggtcactacagcaaggaaaagtgctatcagaccatttcccccttgccgccacaaccgtcctgcacccattaaatatgtggagaaagaccatggttgatgctgagagggtacatattcaatcatgtagcatgacccatatgcatggctagatatgcaagtgctgaagtagtagaagactagaaatgcaggatgagatgtcaaaggtcattttattcccctggtctccttagaaatgtagtccccgacttttcattctcaagaattcagccatccaataagcaggcatcatatatgagatccttaattgagccatgttatccaagaccagagcatatttttagacatctcttattcgcccagccatctgcatgacatgggtatttattagtattaccagttggtgctcaaagtcaaacaaaaatattttagttaataatgggcagtaaaatatgattttacattattttaaatatttgggagagttaatttgttagctaaataattcaagggaaagagattattcaactggtcataatcacccctgataatattattactaatcttaattatttattacatcatctctttctcaatggatctaatgttttaattttttcccctattggtagaaaccaataacagaagtaatttttatattatacacttggagaaataaagttgaaacagaattaaaaatatttctcaaacaactgatcacaatataaattaaactaattcatttttgtgtagacatacgaaatcacaaaaataataacactgaaataattctaccaatgcagtgatggaaacacttttcttatgtaccaagacatagataggtaagagaaataaagaattgaagtgaattagaaaatccattttattgcttgggtttaaaatagttgtgggatacaagtatttacaatgctattggagtcaattattgacaacactttgcaacagtaataccatttctagcttttcaattggcaatacttagaaccttactgtagtgacctgattttaaataccatattatatttactaagttaagagctagtttttactctcttccataatttcattacatgaatgtaagatgatggctcaaaaatgacgacttatagtttgaatttatgtgtatgcaatatacatatgagaaccaaattcaacaagtgacatgaatgttactacatgaacattgaattgtattgcccttgtcagttatttcctctgttcaataaatactgaaggtcacaaac

SEQ ID NO: 534 - DNA, 1564 bp, Homo sapiens
  misc_feature 936: n = a,t,g, or c
cttttgtgctacgagtcagcgtccgtgcgcgaggacactgagccgggctggctctcctttctgtggttttatttaatgggcttgaatttgcattagatcagatttttgccgcatcacattgttccacagactgaatgctgtgttcgtatcgattgatgaaacgtgacaggtccgccaattgctcgtttgcactgagagaggacaacagtttgaaacttacttttgtgtgtgtgtggctttggaagccagtagctacttccttagttcagttctttactgttcctcgaataatctcctgactaaggcaaaaaaaaaaagcttctcctacgagaatcagtctaacagagatgccgatgtcagcacagccctaagcagtaagtcatattggcatttccacgtgactgtgtttctatcccgtgtacagagagatccagagccctacactccacgacctgggggcgcacagcacagaacctagaagcacctgctgacactcttcaactgatttttaaatgttgttgcttggagataaaaattacataagggactttttgcctgcattctagtgcaaaacatctgaagagctgtacacccacaagggtgactatttcccctgagtggccgtgttgtcccagtgccctggttcagtgtctcttgagtggatgacaggtcttcattctctatcttgaatgtattatgggtactaatagttttaaaatggaggtcaagaattaaagttatgtgggagtttcaggaccaaggaaggctaaaatttgtcaagacgctgagcgtattttgggtacctatgagaagggttgtgacagtgtacagtggcagctgttggcccggctgcagaaatgagctggagctcatgggttttcagctacatttttcataactttgtagtacatccatctgaggtaaattaagccacantttggtacctagggtctcaaactaaaatttatttttataaatgaattttaaaagaaaaaatatctacttcttttaaagttagaagaaaattaacctgctgacaggcaacatttttggggtgctttctgcactagttttccttgtaaatgatttgagtgagtaggtttggtttctgacgaaagtagactggagggtagcattgtatgcctcaaatgtctcagtgtgtttggctcatacgtgggctatactttattattttggtatgcttacaaatgactaaccaatcaaattgtcattaatgtttggaaaatctgttaatgcacatgcacaataatttcctgaaagccataggacatgtctgtagtcagcaccacgatagcaccgtttcatgaaaggcatggcggctgcatttcataccacatcaaaatacagtaacatttctatactaaattaacggtaatacctcaaaactgctccggtagtagtttttattggattgaaatttacagtttagtaaaaggcttaaaatttcttatacttatgatatattctttgccagttgactaaaataatgcatgttaacagttggtctgtatttgcatgtaaaagtgggccaccacctcgaaac

SEQ ID NO: 535 - DNA, 1869 bp, Homo sapiens
gccgcccggtaggatgtcctggccccacggggcattgctcttcctctggctcttctccccacccctgggggccggtggaggtggagtggccgtgacgtctgccgccggagggggctccccgccggccacctcctgccccgtggcctgctcctgcagcaaccaggccagccgggtgatctgcacacggagagacctggccgaggtcccagccagcatcccggtcaacacgcggtacctgaacctgcaagagaacggcatccaggtgatccggacggacacgttcaagcacctgcggcacctggagattctgcagctgagcaagaacctggtgcgcaagatcgaggtgggcgccttcaacgggctgcccagcctcaacacgctggagctttttgacaaccggctgaccacggtgcccacgcaggccttcgagtacctgtccaagctgcgggagctctggctgcggaacaaccccatcgagagcatcccctcctacgccttcaaccgcgtgccctcgctgcggcgcctggacctgggcgagctcaagcggctggaatacatctcggaggcggccttcgaggggctggtcaacctgcgctacctcaacctgggcatgtgcaacctcaaggacatccccaacctgacggccctggtgcgcctggaggagctggagctgtcgggcaaccggctggacctgatccgcccgggctccttccagggtctcaccagcctgcgcaagctgtggctcatgcacgcccaggtagccaccatcgagcgcaacgccttcgacgacctcaagtcgctggaggagctcaacctgtcccacaacaacctgatgtcgctgccccacgacctcttcacgcccctgcaccgcctcgagcgcgtgcacctcaaccacaacccctggcattgcaactgcgacgtgctctggctgagctggtggctcaaggagacggtgcccagcaacacgacgtgctgcgcccgctgtcatgcgcccgccggcctcaaggggcgctacattggggagctggaccagtcgcatttcacctgctatgcgcccgtcatcgtgaagccgccccacggacctcaaatgtcaccgagggcatggctgccgagctcaaatgccgaacgggcacctccatgacctccgtcaactggctgacgcccaacggcaccctcatgacccacggctcctaccgcgtgcgcatctccgtcctgcatgacggcacgcttaacttcaccaacgtcaccgtgcaggacacgggccagtacacgtgcatggtgacgaactcagccggcaacaccaccgcctcggccacgctcaacgtctcggccgtggaccccgtggcggccgggggcaccggcagcggcgggggcggccctgggggcagtggtggtgttggagggggcagtggcggctacacctacttcaccacggtgaccgtggagaccctggagacgcagcccggagaggaggccctgcagccgcggtggacgaagaaggaaccgccagggcccacgacagacggtgtctggggtgggggccggcctggggacgcggccggccctgcctcgtcttctaccacggcacccgccccgcgctcctcgcggcccacggagaaggcgttcacggtgcccatcacggatgtgacggagaacgccctcaaggacctggacgacgtcatgaagaccaccaaaatcatcatcggctgcttcgtggccatcacgttcatggccgcggtgatgctcgtggccttctacaagctgcgcaagcagcaccagctccacaagcaccacgggcccacgcgcaccgtggagatcatcaacgtggaggacgagctgcccgccgcctcggccgtgtccgtggccgcc

SEQ ID NO: 536 - DNA, 1014 bp, Homo sapiens
  misc_feature 182: n = a,t,g, or c
gcctattcctaaacaagcagggctgttacacggtgatcctcaacaccttcgagacctacgtctacttggccggagcccttgccatcggggtactggccatcgagcttttcgccatgatctttgccatgtgcctcttccggggcatccagtagagggtatggcctgaagcctgaagactcgcnccacccaccactgcccagcacccaatgtcctcccgtgcccctccccgctgtcctcttggccccaggggagaagatgaggccatcagagatggcaggagaagggccaggggaatagagctatttttttaacaaaacaaaatgaagacaaaaatatggactgatgtatcctcgcctggactcagggcaggtgccgtgggttctccagagaccccagcacctggcccaggatgcaggctgctctagagaccaaaggaacaccaggcccagcgccctctttggtccagccagaccctgggccctctctcctcactgcaccaggacctgatgccaagaaagtgaggatttaggcaacaaggaggcaaaagcaaatctcagagaagtcatcaaagcccaggggctgcacggagattcagctgccatgtctttgaggactcggaacccacagcgcaatccctggtccactggaggatggactgttccccccttcaggccggggccaagagtgagctgctaacacggcatccaagaatggcccagctggtaggatccttgctttcccccatctgttggaccaaataatctcaaaggcccagagaggacagtgaccatccacagacacacagcacaggcgtgacagttctgaaaagaagctgagttgtctccaggctgctgtcactgcatccaggactctgtctgctctgctgcccacatgcacccctggcctcagcatcccgttcccccagacatgagaggacaagtcagccagggactgcctcctccctgctctactgctaagaaaacgccattccatgacttcccaccaccacgaaac

SEQ ID NO: 537 - DNA, 2015 bp, Homo sapiens
  misc_feature 1741,1742: n = a,t,g, or c
gcgccgcggacaccggcaccggcgccacggactccgcaggaccccgcgcccgccgccgccgctatgctggggctgctggtggcgttgctggccctggggctcgctgtctttgcgctgctggacgtctggtacctggtgcgccttccgtgcgccgtgctgcgcgcgcgcctgctgcagccgcgcgtccgtgacctgctagctgagcagcgcttcccgggccgcgtgctgccctcggacttggacctgctgttgcacatgaacaacgcgcgctacctgcgcgaggccgactttgcgcgcgtcgcgcacctgacccgctgcggggtgctcggggcgctgagggagttgcgggcgcacacggtgctggcggcctcgtgcgcgcgccaccgccgctcgctgcgcctgctggagcccttcgaggtggagccccctgagctgcccgctgatctgcagcactggatctcctacaacgaggccagcagccagctgctccgcatggagagtgggctcagtgatgtcaccaaggaccagtgaccgccaccttcacaccgtctgccctggccaccatcctgggcctgggggctgcccacagatgggcagtctcagccatactctgttccagctggagtagcctcctgaccagcctggcccaccctgctccacccactgggcccccccagttattgatacccctctgtgctgggctccacgctagcagaaggaggagtggcattggcatcctgacccagctctgccctcaaggtggggatggatgggcaaaggagagtcctgcctggccctacgatgaggccactcatgtgggcctaggtaggggaggatggtgcctggagcagagggacccacaagtgcctcccgagcctagatcctggctcggaccactgcaagggccgaggcagggccagaccagagcatcctgggtacaggcctgggctctccagggcctgggcctgattcaggtgcagtgggcactcctgaagggtcagagcggcatctgccaggcagcccctctggcttccgctgaggtggttgcaggcctggggcagagcctgggtggtcagaggccggggctagaggcagatggaagggaggcatttgctgacagaggacggggcacccgggctccccactgcagtcggccttgcctcctcctcctcctctacctccagtcaggctggacgggagggtagccttgtggctgagaggggtcagactaggtggcacaggggctcctggaaagacagcaggcttcctgctgggcgttcccttgttggagggaatagagtgggggtgggactctgcaggggtgtccttgtccactcgcacccctcgccgcccaccagggccatgctctgtgacttgggctgatccccaccctttctgggcctacagcaccacaggccgctgtacccccttagagctgcccctctctggcctggccggcaggcgtcttcttaactcctctgtcctctatattcagcatgttccttgtcagctgctgggccggccctgccttgcgctagcagagcctctcctggcagcttctcaggtctccctaatggagacaccaggctactaggacactggctggggccaccccctcctgcctaatgcctcaccttacagtggggaaactgaggcctggaatggcccagagtcaccaaggcaaagttggggctggtcccagcctgaggctccagctgatgccctcagctcccagagaggnngtgccccatctagctgggtgcaggggtcactgcttgtcagctcagggccctgtgcccgcttgcctgttcccctacatctgtgcctgcacatccagaactgcctccttgccgctgcctccaggaagcccaccttgagccagagtcaagggctgcagcactgcccgatagaacacgcccgccctcactgctgttcttgccttacagccaccatgggaaagctgcaacctttctgttttatttaaagaaagcccaacattaaagggttttcattgc

SEQ ID NO: 538 - DNA, 1202 bp, Homo sapiens
  misc_feature 844,845: n = a,t,g, or c
gatcataataatggtaacagtttatggagcagctgctatgtgcccctggcccttgtctttacatatctatatatcttgtgtaagtgggatcacactaaaataatgtctcatttataatttgtgttcccagcatttagcacagtgcccagaatgtattgtgtactactaaacgtttatctaatgaagagtcactttctctttatgagaaatatttttcttaatgtatgtagacatattcataaatatgctgatagaaatgcctgtactttttggcatttgctagacagtagaaaatggaggagacttggcctagcaagtttttgtttttgttttgttaaaaaaacaaaaacaaaaacaaacaaaaaaaaacacctaggagtcttttttttgagacagagtcttgctctgtcccctaggctggtgtgcaatggcatgatctcggctcactgcaacctctgcctcccaggttcaagcaattctcctgccccagcctcccaagtagctgggattacaggtgcccaccaccatgcccggctaatttgttgtacttttagtagagacggggtttcaccatgttgagcaggctggtcttgaattcctgacctcagacacttgagaatcttaaagggaatcttgaaatgagtccatagtgttatatagtttctcagaataacccgtgcatctgaaactacattcgcagaagtggcgtatctagcttgacctgaatcacccatctcacacctactgttctatcacatgcatacatggattttgtttcaaagagaatgcaaataaatgaaataaataagggtaccaggaatcagaacttggcgtggcatacagnnaatggcatacttgagattgctaggaaagggagagaaaactgagagcagtgtctgagaacatactgcaaatacggtaaatgaaatgtggtctcatagcagagaaatgacactcgttctgggccaccctcaacttggtcctcgttaataccaaagttacaggaagacatatgtttatgtctccatgtttttttgtttgttttttgtgttttttttgagacagagtctcgctctgtcactcaggctggagtgcagtggcgcgatctcggctcactgtaagctctgcctcccgggttcacaccatcctcctgcctcagcctcccgagtagctgggactagaggcacccaccaccacgaaac

SEQ ID NO: 539 - DNA, 830 bp, Homo sapiens
gcttgtttccaaagcaacaaaagctttacatgattaagtagactgagggctcttccatattagacgaaaatatccagccaaattgctgaggactccctcagacaggaaaaaaaatgtttagagccatcctcacaaagaaattttcctgtttaattataacctaattatgacaacttttttttctttaggtggtcaggctcaggatggaccatgagctttcaaaaaggaaaaaggtggaaatcctcaactatgctgccatctgaataagtgtttctttgtagatgcacagagtcaaggaaaattacatccctgcattatgtaatgtaccaacaacgcacttacccactgttttaatctaggttattcttgaaagcagagcctgagacaaaggtagacacattctatttatgagtctaacacccaggagcaggaatgagagataggggagtgaactggggaaaagggaaactaagtccgagcaaaaccagatactgctcttatcaagtggtccacccctattaatggctacataatgcagaactttctcaggattcttcttaaactttatctcagaactgtctgcctcagggagaaaggagaagtatttctccatcagcagccacctcctgtgtgttgagggctgctcctttggggcattaacccactgcctccaccaccccaaccctctgggctgcaaagagctagctgacagtccagctggtaccttagcatcacacattgctgcatcagagaggtcttaagacaggaagctagagtcttggtgcatgctcgaagtgagacggtgtcagcacagagcaggattcagtttg

SEQ ID NO: 540 - DNA, 1738 bp, Homo sapiens
gttgttgcggtgtgagagaagaggaacatcatgttgaatatgtgttttctacacatacagcagataagggggactgctgttctagctgcacctggttcatttgtccagaaatcatgttctttgacaatgcctgctcattatattgattctactaatgatgccattttctgtcagtgtgataggattctgttagaattatgactattttatactgtaattcacatgtaaggtaacaaattttgataatcttctttgcatttgataagtatatgctaagcacataagaaaggaaaaagggttcttaattcattagttgcctacaaatagtataaataataattttagtgtagcctccaagtatgtttctaaagaactgctttgtaacaaatcatgagagtctctgtaataaagcatcaaagtcttatactttttttcctacaaggtctaaggcatgtacaaaagttcataattttttttttcttttgagatgaagtctcactttgtcacccaggctggagtggaatggcacaatcttggctcactgtaacctctgcttcctgggttcaagcgattctcctgtctcagcctcccgagtagctgggattacatacgtgtgccaccacactcagctactttttttttgtatttttgttgagatgggatttcaccatgtttggccaggctggtctcaaacttttggcctcatgtgatccacccaccttggcctcccaaaatgctgagatcacagacatgagccactgtgcccagcctgcatgattttttttttaataaagagtcttgctatgttgcccagtctgttctcaaactcctgggcttctcaagtgatacttctgcctcagccttctgagtagctgagattacaggaacaagccactgtacatatatatatatacacacacacacacaccgagtatatgcccagtaatgggattactggctcaaatggtatttccggttctagatccttgaggaatcaccacactgtcttccacaatggttgaactaattgacacttccaccaacagtgtaaaagcattcctatttctccacatctgctccagcatctgttgtttcctgaccttttaacgattgccattctaaatggcgcgagatggtatctcattgtggttttgatttgcatttctctaatgatcagtgatgatgagctttttttaagatgtttgttggctgcataaatgtattcttttgagaagtgtctgttcatatcctttgtccactttttgatgagatcgtttgttttcttgtaaatttatttaagttccttgtagattctagatattaggcctttttcagatggacagattgcaaacattccctcccattctgtaggttgcctgttcactctgatcatagtattggaagttctggccagggtaatcaggcaagagaaagaaataaacgtattcaaataggaagaaaggaagtcaaattgtctctgtttgcagatgacatgattgtatatttagaaaaacaaattgtctcagccccaaatctccttcagctgataagcaacttcctcatggtctcaggatacaaagtcaatgtgcaaaattcacaagcattcctatacaccagtaatagagcactaaatcatgagtgaactcccatacacaattgctacaaagagaataaaatagcaaggaatacaactcacaagggatttgaaggacctctttaaggagaactacaaaccacc

SEQ ID NO: 541 - DNA, 403 bp, Homo sapiens
ggggaattttttcagtttactttctcttccattgtcactgatttgtcccattccagttcatcttctatacggtaacagaagttatttttctaaaatataaagttgcatgtttccattccttagaagagtaaaatgactcttcactggctttaggaggaggctgacttgatctgtttttaactttctcatctcttctgctcttcacctacagttcagttccctaataatgtcatgcttattattttttgatacactattaagggtcaagtataaaaagtattggtgtaactaaaggaaatagcctagttattttcttaggcagataaaccacaacatgattctgaaatcataaatccaaaccccatctttccatgctgtaaccccagagccaccaccacgaaac

SEQ ID NO: 542 - DNA, 1776 bp, Homo sapiens
attttacattccatttaagtttttattgcggagaaatttcaaacagccagaagtagatagaactctatagaccagatctccatcacccagattcaacacttaaaaccttatgaccaatcttgattcatctcagaatggacacagagaatccttgcaatccagagttcaccgtcactgcccttactgtgtaagagcacggtctccacagccacatttcctctaggctctgtcactttatagctgtgtcaccttgggcaagatgctgacttcactgtacctcagtttcctcgattttatcctaaagaggataatagcatctatcgcattgggttgttgaaaggatagaatgaggtgaaactcctacagtggctgtaacagtctctggtgtatactaagtgttcagtgaatattacctttcattaataacaggcacagagaaggtcgcttcatgctcagcgtcaacagcatatcagggcaggtcgtgctttcaacctgtacccagctgtgttccaggaagctgcccgcagttcttttctcttttcttctgtggcaggttcattcctgatgctgttaaggaataggaggtactgccctgctggagaggatttcccttgattttcttgaacgctttttgttcttgttctgcctccctgtggctcctgtctgcccagagaggactgcctgctggggaaagggggtactcctgagctcctgacagcccagcttcaggtgggtgccacttaccttttgcatttcgaaccatgagtgggtttcttttgctcagccttgacgtctgtgttctacaatgtcccatccagggatcagggcccagctggttccttcaggaaactaggcttgttttaagagtgatcattttcacagggaatatttttcagagctgatgctctcattcattacacctatattcttcccctacattccttctttcagtatttgtgtcagactgctcattcccagggcttgtcaggtcctgtgaagttgttaacattctgtgtcttctgtcttccaatactctcacttactcttttccctgctagagttttggcagcaaatcccagttatatcatttcacctgggaacacttcaggaggcatctctaacacataagggcttctttttttaacataaccacaatttcattgtgtatacaggtacattggtacaattatattttggtatacccaacaaaattaataacttattaatatcatttaatatctagcccatattggtttcccccattgggtaaaaaaaaaatcttttttttccaccagtcagaacagccctggtcagaggccggagagggaaaagtatctggaaacagcataccagttttccctatctctggctcatttctcctcctattcttctgatcttgctgatctgtgttgacagccttataacttgatatgagctggacctctgagttttccttgcatccttgtttccatacttacttcccgtttgttgttgtgtcctcctggccgggcgctgtggctcacgcctgtgttcagctctttggggggcctgtgcgggctgctctcctgaggtctggtgttcgagaccagcctggcctacatggtgagcccccttctctactatatatactttttttagccaggcgtggtggcacactccgataatcccggctattcgggaggctgaggcaggagaatctgtcgcctgggcgacagagcatgactccacctcaaaacaatacaaatgttgtatcctcctattccaccaccacgaaac

SEQ ID NO: 543 - DNA, 1355 bp, Homo sapiens
acgaactttaaattgttagcttttattttttaggtctatgatccatttggagttaatttttgagtatgatcagagaacatacttgtatgacttccaacattttatatttattggattctgttttatgccacaagacatgatgtatcctggagatttccatgtgcacttgagaagaattttcattctgctgtgttgggtgaagtgttcagtagatgtctgctaagtctaggtggtttataggtttgttcaggtcccccatttccctgttcatcttctgcttagttctatcaattattaaaaatagagtattgccatgtccaattattgtttttgaattatcttttccttttttcaattctttccattttcgattcatgtatttgaaggctctattaggcgagtatattttccacttgttatagcctcctgatgagatgacccttttatcattataaagtatccctctttatctctagtaacttcttctgttgttgttttcatgtctattttttctgatatcagtatagcaactccagctttcctgtagttgctgttcgcataatatacctttctccagccttttacttttaaactatttgtatttttccatctgaagtgtctcctgcagatactgcattaaaagtttggaaaatctaaaatgcgtattagtactccttctcttccaggacctggatggccagtaaaaggaagggtctacagcctccgtgtgcgactggttttgctggtggtgtagacagattgaggatgatggataggggtattgtctaaaaatacctcttcttacctttgactgagagttgacaatatcatggcaaggtgaattctatcagaaagtcctgtcttctagtggcttttaatataaacatcagaaaatccatccctgttccttaggtacaactcttgtccagccacaagatattcccctgaaataggaatcagtggtctgctgtatgagtttcccttttatgtttcttttccacagtttgcagggtaaaagataatactcctctaatttccttctttgtactccccctattatcttctcatgccataagctcaaaaacctatgtattttggatacctacattgattatatgtttatacctaaaatccaactagaatagttaaacaatgatagcaacaataacaacagcaatttaattaattatttaattaaactcatgatcttgaatctcagcaacacagacccacctgcatctccagtgtccattcagtgtctatcttattcatgtatatggaaggtctgatggatttatactgatttaatactttcttcttcttcttgtttgaacccacaagccccaccacgaaac

SEQ ID NO: 544 - DNA, 1643 bp, Homo sapiens
  misc_feature 1585,1590: n = a,t,g, or c
gctctgtagtgaatcggtggaagggcaagtgccacattcattagagaccttgtatcaatcagctgactgttctgatgccaatgatgccttgatagtgttgatacatcttctcatgttggagtcaggttacatacctcaggtaagtactgcaagcaaaacacagacatcttatgattgctcatacatgtggatggttcctgctctcaagttgcccgtagtctgagagtggcagagagagacaaaaatataaagcactgtgctatattggtgaagttctgggagaaacatactcatatataggatgccaggaattcatggaggagaacatttagaatattgcttctcaaactttaatgcgctttggaatacctggggaccttattaaaatgcagattctgatttagtaactgtagaatggaccgtgaacttcttcatactcctgcataataccaatgttgctggtctgtgagccatgttataagttacaaagatacagagtagttcggtgatcagtgcacacctgcagcatgccatgcactgacctagaaattaggatataaaaatattgggatatttcttgtcttcaaggagtccatacatagaggagagagacgaataaaaagatactcagaaataacacaggtaaacatagataataatacaattgaagtgtaatggaaatatgaatagaatgctaggggatgaaaggaaatggcaaacaatttttctttgaaaaaggctttacggaggaagtgatatttgagccggagttttaaataatcatatggctttgctaggagagaagtgagtctttgaagagagagatcaatccctgtttccatgatgcagttttacctatttgaacaaaaattttgattaaaagtgttctaatatattatcttatacaatatggttatcctacaatataaaatatattggcaatgttaatgatttgatgcattttattaagaggactgtgtggagtgattatttcaaacaagttaggagtcttttggatttttaatctttttgagagtaacacctttcttcattatttgtttccctttcatttcgttccccagggcaccgaagccaaagcactgtccatgccggagaagtggaagttgagcggggtgtataagctgcagtacatgcatcctctctgcgagggcagctccgctactctcacctgtgtgcctttgggaaacctgattgttgtaaatggtaattggatagcataggcatggttgctggtttatggattcttagacgtttctttccaaatgttttatagccacttcagtgattggctatcatgatacagttgtgagtccttctcaactgtatttaattcctaggccactgataacatgtgtctggaagatcatggaatatgaggttgttgagttgtttaggccagcacccttcattcttagggcatccatttttttgatgtcttaatctttgtaatattttgctctgggggataatatttaatattatccaatattatcagtatttgataataggagtgaaatgagcctattacacatgaactccttggagaatactttttctttatgcntgtgnatggctttatttttttaacgaaggtcttgaactgagacatggggacaagctcc

SEQ ID NO: 545 - DNA, 2383 bp, Homo sapiens
  misc_feature 2285,2325-2327: n = a,t,g, or c
gtttattgtatttaatacattataaaatttgaaaaattgtaggaaagcagcagacttgaactggagcaattctaacaaggaataattctggccccttggcaaaactgatcagttttaaaacaaagtaaagttcacatctgtgaggtggacaaaaaagtgtgacttctgtacaaactacatttaaaatttcatgtctaacatctttgcaatgtgctcatgagggtttttctgaagtcctgcctggtccctgcctaaagaaagacgtggaacctccatatacaaacaaacttgattcaaggtgttttgtttgttttgtttttttaaaaaaaaaggaaaaagaaagacaaaggaaaaaagaaatatggatggctgttgttggcaatggaaactgtaaggagactgtgtcctcaccactcatggcttgtttatttgtcagaggcctcgggaggcccaggacacttcacggccatcacagcaccaactgcggctgtcacctttttttttttttcttttttgcatttcctaccttttgacatatatatatatatttatatattttttacaccttgaggatatcactattccaattgttcccatatgaatacaggtgtggtctctattggatataaatgtgtcttttattcgattttacgtccaggacttggtttgctgtcccaactgcacataaatgtcccttttttgtttgagttattggttgtgtgcgttttcctttttgcataagaaatatgtccatttagtccagaggctcttgctttatccggatgacggagggtacacggggcgtccgcctcagttcccgccgaaggacgtattcgctgaactgggacgagtctactcctcccccacaggagcccacgatttcaaatcctctttgctgcaacctctcgaggacctggactgagttgaggtgacagtagccatttagtggaaacctgatgacgtgcgtcgagtcgtgattccagcctgcattgacagagttacacatcacgtcgccgatctctggaaatacttcttctatcaaggatttgtcaccgcttagcgtgatcctttctccgaggtctggggccacacgcacgacgaggcactcacagggccttgaaaatcgaccagtttctctgtcctgcttccatctttccatctccaacaacatgggctgaagctgaaaatattttgcctcttcatataacaaagtgtagtccttgaaatcatcaggaatgaggagtttggatgttcgtagaaaattcaagatatatctgaacatctgtccatctctgtcaatgaaatagtgctgtttgagactgtccaaaacaatgggctctgtaccatcaaaaagtcttccgattctggattcagggtatttggtgagggtggccaggctgctggtgtacatgtggccgcccacatcaatgtggacaggcgcattggattttgtgagttgtgctggagtagggatgcattggttgttcagtggagatgcaggggatctagtgatcagaggtcttgacatattggaccgactgtcctgggtgggggaaacaatagcaggtgaaactattgtggagaattggtgcttctgtgcccattggcttctggaagaagaggcagggggtcgtgtttcacggaaaccaccaccaccgcatccacaggctccgaggggcggatacaaagtcttttgggggaagtggggccgcagatttcccccgacccgaacacagactcgtacagggcgcgcttgggcgcagcctcggatttcacgtcgggcccgacctggctgtctttggggaggatgtaagtgttccccagcgagggcggctgggggcggtggtggtgggagggatgggtgggggggtggtgggagtggtgccgtgccgccccgttcagagcctcggcgtagcagccctgcggggcgggcgagcccagcttggtgccaatgcccgcgatgctgttgagcgtggcgatggagacggcgccgatgcagtggttggtgtaggtcttggagagcttggccgccttggagagcatctgcatccgagtgcctagcaagttcttgccgatggctttgttctcgtaccaggtcacatcgccctcgctgcagtggtcccggggaccgctggaagaacgccttgcagagagggttgcgtttcgacaggtacttgacgaagctggcgtaggggcagaactcggtgcccgtctcatacatgcggggcaagttctcctcgtcgctgctctcggcgcgcttcttgctccacgacgacgagcgcganatgtggtagagcccgagagacttgaagtagacgaacttgnnnacgaccacaaccatgaccagcccaaaagagtcctcctccaactcacgctggttctc

SEQ ID NO: 546 - DNA, 827 bp, Homo sapiens
gtgtcaccttgcgccttgccctctttggggaacacgtgggagccttgcgagctctgagcctgcctctgacccagttgcctgtgtccctggagtgttacacagtgcctcctgaagacaacctggccctccttcagctctacttccggaccctggttactggtgcgctccgcccacgttggtgccccgtgctctatgctgtggctgtggctcatgtcaatagcttcatcttctctcaggacccacagagctcagatgaggtcaaagctgcccgcaggagtatgctgcagaaaacatggctgctggcagatgagggtctccggcagcacctcctgcactataagcttcccaattccacgctcccagagggctttgagctctattctcagttgccccctctgcgtcagcactacctccagagactgacttcaacagtgctccaaaatggggtatcagagacctaggatagttgatatagatggaaagatgggtacgttgtcctgtatccagcctttcaacagatgtctggccagacgaagaacattgtgtcctaatggtaggcaggagaccaaggagcagaaggcttgccttcctggggagcaggttgtttgagctgttttagagcagtgagccctaccattacatcctgatatctggggcttctgaaggtctgtgctgggagtgaagagtggcttagctatttacccgctctttggggacagggcaaactaaatgcatcccttcttacctaactcccaacccctgccctgggctgaggcatatgaatgctatagttgtgttatataaaataaatatgttttttctctccc

SEQ ID NO: 547 - DNA, 2305 bp, Homo sapiens
  misc_feature 928,1170,1955: n = a,t,g, or c
atctttaaagtctttgtcctggacttactgctgccaaggaataaggtgctattcccctgatagcagtaagtccagggacaaggattgtccctagctgtgtgaccttggacaagggttgatgtgaaggtcaaataagaggcctgatgggaaagggcctataaattggaaatgttgaacactcacccaggactctggccctagagccctcctaggtttgagcaggagaggagagagggctgaacagtctccccagtccttgccacccagaggttagcaagggaggcaatggctgcagcctccactctgggtctgacctctctctctgtcctcctccctccctctttcttcttctctcttatgccttcttcctccctggcctccctctcctctctccacccctgctgtatctccaggcctggagctgtgcgacccaacccagaggcttcgggtggccctggcaggggagttggtgggggtgggagaacttcctgttcctgggcttggccttgtctctaggatggggatcctacagcgaatgatcaccgctccctgcatcctcttcctgttttatgggtcagtattacccttcacctgtcgtctggcaattcccatctctgcctccaaactagccctagcccggagacccctcctcttctccaactacccctggtccaggcctaccccagccccagtccctcagaagtgcacatttcccacccctagatcaggagaagggaggcctcacagtataccccttcccccctgcccccatctggcccggtttgttcctggagtccgcacggtggctgatagtgaaacggcagattgaggaagctcagtctgtgctgaggatcctggctgagcgaaaccagccccatgggcagatactgggggaggaagccacgaagccctgcacggtaagaaacanggatcctgtgagtgttgcctccacttgcacacctgaatggtgccctctgcatggctgttagctgtgccaccttctcccagggtccccaccacccatgtgggaggatcctgggatctcagggttttcttctgacagctcctctctctctcccgaagacctggagaatacgtgccctctccctgcaacatcctccttttcctttgcttccctcctcaactaccgcaacatctggaaaaatctgnttatcctgggcttcaccaagtgagcctgggtgtctgggctgagggccaggccagtagctggaatgggggctggctgggtgggaaggcccggggacccctgcggaggaccataagcactgtggaaggctgcgggaggggattcaggctctgttcgttgcttccccaccccttctcacagcttcattgcccatgccattctccactgctaccagcctgtgggaggaggagggagcccatcggacttctacctgtgctctctgctggccagcggcaccgcgaagcccttggcctgtgtcttcctgggggtcaccgtggactcgatttggccgccggggcatccttcttctctccatgacccttaccggcattgcttccctggtcctgctgggcctgtgggattatctgaacgaggctgccatcaccactttctctgtccttgggctcttctcctcccaagctgccgccatcctcagcaccctccttgctgctgaggtcatccccaccactgtccggggccgtggcctgggcctgatcatggctctaggggcgcttggaggactgaacggcccggcccagcgcctgcacatgggccatggagccttcctgcagcacgtggtgctggcggcctgcgccctcctctgcattctcagcattatgctgctgccggagaccaagcgcaagctcctgcccgaggtgctccgggacggggagctgtgtcgccggccttccctgctgcggcagccaccccctacccgctgtgaccacgttcccgctgcttgcaaccnccaaccctgccctctgagcggcctctgagtaccctggcgggaggctggcccacacagaaaggtggcaagaagatcgggaagactgagtagggaaggcagggctgcccagaagtctcagaggcacttcacgccagccatcgcggagagttcagagggctgtccccaccctgcctcctccctgctgctttgcattcacttccttggccagagtcaggggacagggagagagctccacactgtaaccactgggtctgggctccatcctgcgcccaaagacatccacccagacctcattatttcttgctctatcattctgtttcaataaagacatttggaataaacgagccccc

SEQ ID NO: 548 - DNA, 632 bp, Homo sapiens
gtggtgggcaatgacacctccaaggtcactttcacgggtgggacaggtaagtgttctgaattcattttgtgaatctgagcatgtctgttaggcacaactagccgtttcacaagtggtcccagctatagcaggaatggctcccagataggccctgggtacagggccaggcaagtggcaggcactcggcaagtatctgaataggtgagggaagcgcgtgtcatcgaatgagttttctaggaggctcctcacctcttctagcttgcctgactgcttaactttaacatttgagcttttcgggccacaaccaccaaagttgtttgcgtgcatttaagcaccagcgtgggacgtgttggtgctacagcaaggaactagggcactgtgcatggcatctggcacatagtaagtgcgcaggcttgtcttccagagggcacagggtatggccccagcccagtgaggtattcctggactgcaaagggcagtgatcagggcgtcatccactcatggcctctctgactgtcccagtgctgtgggggccaagcagacaccctctgatgcccaccacgtgagcaggatgattaagaattcctgcagtttgcttccatgattccaaccctagattttcaaagcagcct

SEQ ID NO: 549 - DNA, 4334 bp, Homo sapiens
acattatccagtttggatattaagaatatgccattttatggaataaattggatggatttctgtattttcctaagctgttgaacaatttaaataaatttaaaattattatttttgatttttaataaaaatctatgcaaaaccatcagatcctagtatctcttaggagatttacgactacttttccagcattgtttatgttcgtggatctattggtttttccatctcttcttgagttgatgtggacattgaaattcgagtataatgacaggtgtggtgttggagggaaagagtgttcaagcaagctccagttgatggtatttcaagacacaaaagggaatgacagaaagtccagtgggataacaaaaacaagaactgtaagtagacaatcgaatctaatggtttacgcttcagaaaactcacatgaattgaaggaggatggagaaataatggtctggatcttcacgaaaaggaggagaacctataaatcaccttgagctcaaggaagacagtttataggagacaaaattttctccacctaagagggtatcagtggaagtagtagactaaaaagaaatagcaattatagttttgtaacatttagagaagaaagtaactaccttggagaattttggtgtaaagtggttcgagttctagaaagtgcagtggaagggtctgggggtcaggagaggtggcagatcggacaaatttagcaaatgtgcctacagtggtgaaagcctctgtgtaggaggtgacctgggagttaaacttctcgtgggaatggaggtgacaggaatgtgggacattgatgagattagacctgaaggattttcaggaaacctgtgacaataacactgcaaatactggcataatttttaaagaatgggaaggtaagaagcgtcctgcaggagcatgccgaattctgtgtcactcagtggttccgtctccccgtggctgtatggaggtcacacgagggagatgtgccaactgcacacagaactaactgcctaggcagctttgccaggagtatttatggctctgtcttaaatctctgattttgatatccacaaataggatagcatcatagttttggactctttgacaccaatttcgacctgtcatctacttaacccatagccattaccataatctcaaaatcaagcattccactcttagacattatttcccacctttactgtcagcccatctagtgcccagatgccaataacaattccaactcttttggatttccaatttatggaaacttccccactgccttcaggtgtctttttacctgactgatttcccgggtccaacgtaacgaacactccctcaaatgtaagctctatatgctttgtcctgtctctcttcattttccctacatatctaccaaaaatacaactctggttaaatttttcatctattcttcacctgaatagttggagaaaaacacacaaccaaacttgcttgattcattttagattcataaccaatgatctccaatagaaacaagaactctcacttctctagccaattcactttctctcttcccaagatgaagatttcacaccttctctatcctcctcaaacctataagacgtcctttccagttctttctccaagttgattattttgcttgttaattcattgaggaaatataaacaactaaggaaaattcccatctgttccaacaactcttcaacctaccttcttctctacctgccgatgtggccaacctcctacctcaaaagataaatagctattctgttttttgcctgaaactgtctcctccaattggaaccctggattccatcccatagcctagaataattgccatttttatcaattaattaaaaatgttggctgcctcttcaaaatatacggtacgcattatcctttgagttatttttgcaatgttatcatcatctcttcccctttgggccagacacacacacacatacacatgcattcaaattctgaactattcaacaagatgacagcaagaatgagggataaaacaagaaaaaaaaaaacaaatttagaacttttcaagtgaacacacacacacacacacgcactacactgtaagaaaaatgcagaaccagactagctgaattcatttaattcatttttagatcattggggaagagcaggatggctaggaattaccttggtgatgaaaaaaatgactccttcaaaatcaaaataatgtctaattgaatatactgattatttccttctgaaataatttcaattagttcatttttcttttttcttttttattgatgtataacatattacatatatatgggttatatgcaatattttgttacatgcataatatgtataatgatcaagtcagggtgtttaaggtatccatgaattcaaatatttataatttctatgtgttaggaacaattcaagttctctcttctaactactttgaaatatacaatacattattgttaagtataattactctactctgctgtggaatgatagaacttataccttttatctaacactatgtttatgcccattaaccttccattcttcatacccttctgccaccaccacgaaacaaaaaacaacaacaagcggccttttttttttttttttttttttttttttttttttttttttttttttttttttttttttttttttttttttttttttttttttttttttttttttttttttttttttattctaaaggggaaggcccctttttattaaacttgtacattttactttccttctttcagaatgctaataaaaaacttttgtttatacttaaaaaaaccataaatcagacaaacaaaagaaacgattccaacatcacttctgtgatgagaaaagaggcaatggaattcaacataagcaaagaaaactctacctggaggaaagaaatcgatcagcgaggaaacaactcggggctgctgccagactgcaggccatgcgaggaggagcctcctagaggatttccaaagcaaacccatccctgccagaccaggaagcagccgtcctacctcccagagaaacagacctcagccctaatgatcactcaaatccgagtcaatccctctatttaaaaaaagctcacacatagtctcccctcccttccccagtcctcttggcgacagggcggtcacaggacatatgtgttcttcaccagctgctccttgtcatctccggagctccagacggtgcgcagggcacgctcctggttcctccgtgccacccggatcaggtagaccatggaggctcccaggaagaggatcatcaccatcacgaacagccccgccagaaccaccacctttgagccaaggggcaggggaggattctcctgctggcggaagcagcggagcatgcaggcctcctcagagcggtagctgttcttattgccccggcagcctccatagatgaagttattgcaggagttcctctccacgtcaaagtaccagcgtgggaaggatgcacggcaaggcccagtgactgcgttggcggtgcagtattcttcatagttgaacatatcgctggagtggtcttcagaatcctgccttctgggagcacttgggacagaggaatccgctgcattcctgctggtggccaggtcacccgtggcattctctgtgacagtggcacatttcttgaggcactcctccttggtcaggtaattattgctgtttccgtcacagcccccatacacaaacagctggcaggatccgtcagtgacattgtaccaccacctaggcatggaggcccggcatctgcccaccaccttcgacaccaggcagaagtcgtggatgctgcgttctcggtcgaccgccaggaccccagagaggagcagcgatcccagcagggcgagaaacgcccggctccgcctcagcccgcacagctgcgccatggccagctcagccgagacgcgcaggcgacgccaccagccgttggggtctcgcgatcaggtgcgggaagcccctcaacgcgcacgcgcaatggagcgcctcgcgttcaggtgccgacgctccgggagggtccgccaggtgccaaagcccccggaagtcgcctttccggaccttcagtgtggggacgcccggccttctcggcgcgcgatgcctgggtctgctcctcactcgcgccctcgccgcctgcgacactcaacggccctcagcgcgttcagagccgcgctacacctcccaacgcgcggaggtcgccagagccaatggcgaacgcctattggaagcggctcccgaaggtggccgggcaggcagggggcggggcgcacctggctaggcagggcgagctgggcgcaggcgcaaagggcaggcacctgc

SEQ ID NO: 550 - DNA, 1581 bp, Homo sapiens
gagatgttaacaaacatttcaaccttggtggattatcacaatttgcctacagcattttccagggatttgcataaactagcaggctaacgtgaggcatagatgtgttacctattcatttttattatgcagtttactttggaattctctttgcctgagtatcaactcacaagtggcacttatttctgtatactctttatttttttattcattttaaaaaataaactctttatatataataaatatgtatatggccttgcatctctgaagagcagaaacagatgaacttgaactagaaattagagcttaatggtaggaaacaatgatatggaagctaagaagaaaggtgactagtggtaaaccaagaggagtgatttaaaaaatgttatgaaataaaaatcaaataggaaggcaaaaacaaaatggcatcatggttccaagccatgtacaaaattgaaaaaaaagtaaccccatgatgttactaagcactgtgattctatctgtgcccttatctctcccaagcctccttagagaagtaaacagtcttgcttgtggccacttttttgtttttttttttttgggacagagtctcactccgtcacccaacctccgcctcccgggttcaagcaattcttttgcctcagcctcctgagtagctgggattacaggtgtgcacaaccatgcctggctaccttttttttttttttttttttttttgtatttttagtagagacggggttcaccacgttagtcaggctggcctcgaactactgacctcgtgagccaccacacccagccaattacaggaaaatttcttgcttaaaagtaaattattggacttttcgttttttacatttagggtttgatgtttgaaaaattggcatacacataacttcagaattttatcaattataaaaatgaggcacacctgtattagataagaaactaattataaatcaaaagagttgttgtagttcagtgttttcttttattattttccgctgttgacatccaaataaaaataacattaggaaaattacagtaatgttttctgaaccttttttgtatatgtccccacctagagttcttcattaaaatatggttactgacattttattctagacaatcaattttcagtttcctaatgaaaatcagtggtaatatatttcaagcattgctaaattgagaaaaatagttcagaatattttgatcttcgacagtgctaccagtggacactgttttgttttgttttgtttaggggtatggtggtgtggaatggtaagatcaatctccgctgaagtttctaaccttaagaatttcatggaatgtactcctcacataagctgattttccttaagctatgaatatttttagttttactatcccttgggggtaattatttgctactgtgtgtaatacttcatgactcattttaacctaaatttaccttctaaattatataggctttgtaaaccaaaattaagtattataggatttcctgaagcacccagtgtttattctagctacacctttcctaatttcacagaattaaaaaactttttattctttctcccaccacgaaac

SEQ ID NO: 551 - DNA, 1865 bp, Homo sapiens
  misc_feature 441: n = a,t,g, or c
ggctggccactgaccgcaaacgggcaaccaagccgatgatcgaggcccggaaggccaggactggagacagcagtgcttgaacttggaacagccatcccacatgtctgccgttgcaacctcggttcatggctttggttacaatagctctcttgtacattggatcgtgggagggggcagagggtggggaaggaacgagtcaaatgtggtttgggaatgtttttgtttatctcaaaataatgttgaaatacaaattatcaatgaaaaaactttcgtttttttttttgtttgttttgtttttgagacagagtctcactctgtcacccaggctggagtgcagtggcgcagtctcggctcactgcagcctccacctacctggttcaagcaattctcctgcctcagcctcctgagtagctgagattacaggagcctgccaccacaccnagctaatttttttgtatttttagtagagacagggtttcatcatgttggccagactggcctcgaattcctgacctcaggcaatccacccgcctcggcctcccaaagagctgggattacaggcgtgagcacccgcaccctgccgaaaaaaacttttttttttttgagacggaggctcgctctgtcccccaggctggagtgcagtggcgagatctcagctcactgcaagctccgcctcccgggttcacgccattctcctgcctcagcctcccgagtagctgggagccagcgcgcccagcctaaaaaacttttcaagtcaatattactacgatttaacattagagtgtggacatgtgatttaatcgctatagctaaaatacgtcaaatatacgttgtcatgtgctttgacatgatgctaccctgacaggatgaaggaaagtaatatcctttcagtgtagttcaagagagcatttgtttcttttctaccaaataacccatcattgctttaaaacaaccatcttgaaggagcagagaggcagggtagaagacagaagggggatctatgtggtaactaaagaatgtttctgttttgttaattattgtgtgtgtgtggttttattgtttgcttaagagaatcaaaaactgaaaaaaatgagaatacaggaaatggctcttgtttatttttttgctgtgtttacagcttgttaatgctctactgtctttgtttcaagagagatttgttcactgcccagctcgttttgtgtcctgagccctatgcccagcccaccttataaatcatgcctgtttagatgtttgattttgttctgtttgctattgttatcttaaaggtgtataactctgacatgccagacatcaaattaagctcaaattaagctctcgtttaaatgtttaaacacctaatttatattctaattgatcccagccactgatgcatgtactttagctacttctgctaaataagcatattaattttccacatcaggccatcagatcttgagaaccaacagttatctagaattccgtgtctactaatgtttcacctgcatgcagccttcattaattttgtagcaaaatataaagtgatcattatgtagtttctggattaaaaaaatttgtgtgtgaagttgctttgtaaagtgcatgtggaattaatgggacagtgtgccctttgtgttagatgttagagcaaaagaaagggcttatagtgttagtattggagcactttgaagatagatattttcagaaaagatgtaggatttaaaagttaaattttaaattttagaaaaagatatgatggcaattggaaatagtcacaatgaagttcttcatccagtaggtgtttaacagtgttattttgccactggtaatgtgtaaactgtgagtgatttacaataaatgtaatgagt

SEQ ID NO: 552 - DNA, 1439 bp, Homo sapiens
atgtttttaaactgaattcaagtaacctttttaaaaaagtgacattctgggccttgtttcctccatgtgtaaaattagagtaataataataatcgccctcatagtgttacgaggattaaatgagtttgatgcatgttaagtgttttgttgttgttgtttgcttgtttgttgagacaggatcttcctttgttgcccaggctggagtgtagtggcacaatcatggctcactgcagcctcaacctcatggactgaggcaattctcccacctcctgagtggctgagactccaggcatgcactaccacacctggctaattttttgattttctgtagagatggggtctcactatgcctgccaggctggtctcgaactcctgggctcaggcgattctcctgccttgggctctcagagtgctaggattacaggcacccagactcttgttaagtattttaaaacagtgtctggtacatagtaagtactaaataggtagctattattatgagaaacttcaataaggtaattgtagtgagcttggactcttgtcccttgcacttgctttatgaccttgaataaattactacttcttgctctacctcagttttcacatatgaacaatgagattaatagtaatatctatttaagtagggatgtgagaattaaatgagttaatacatgtgaagcacttagcccagtgcctggcagatagaaactctatataaggttaaaggtaataatggtggtagtagtagcagtagttatatgaggatttaaatttcttctttcatgccaggcatggtggctcacgcctattatcccagcactttgggatgccaaagcaggcagatcacttgaggctgggagttcagcaccaacctgcccaacctggagaaaacccgtctctactaaaaatacaaaaattagccgggtatggtggtgtatgcctgtaatcccagctactcaggaggctgagacacaagaatagctcgaacctaggaggcagaggttgtagagagccaagatgatgccactgcactccagcctgggcaacagaatgagactgtatttaaaaaaaaaaaaaaaaaaatcaaatttctctttccagtccatgtggccactttgacaaacgccttgtttaaaaaaaaaaaaaaaaaaaatttgggccaggtgcaatggctcacacctgcaatcccagctctttgggaggctgaggcaggcagatcacttgagaccaggagttccagaccagcctggccaacatggtgaaaccccgactctactaaaaatataaaaattagcctggcgtggtggcgtgtgcctgcagttccagctacttgggaggctgaggcaggagaatcgcttgaacccaggaagcagaggttgcagtgagccgagatcatgccactgcacaccatcctggatgacagagcaagattccgtctc

SEQ ID NO: 553 - DNA, 2018 bp, Homo sapiens
  misc_feature 1846,1848,1935,1953,1954,1993-1995: n = a,t,g, or c
ccacccccactgccctggccaggcactgcttgctggggtcatggctttgcactcactgtccctggtgtcaggaatgtcttcccccttctcctgtttcccctgcagggattgggcacctgccctaggctctatcccaccacatcccatgttccccatatggtccccgcatttccacaccaccctctcccccagagagcctgggggctcagccaggagagggagctgctggctggcgggcaccaactcacgtgttctgaggagatttttgccagaacctcagggctgggtgtgcccaccacttccatgatgcgcttcagctggtcaatgtctgtgtcactcaggaaacacccacgggccagccacagacccctcctgggcccccagacccaaaactttggggcgctgcccagagcccgctctcctataggtgaggatggccagcccaaagtagcatagcatggggggcagaggaggcaagacccgccagaaggggccagcgctggtccctaccctacaggaggggccctgtttgaccctgctccccaacctgggccaaggatacagtcgctttccgggaagagggccttgccctggagcagctcagccatgatgcagcccacggaccagatatccactgtgcgagggcgaggggacctccattagtgtgcccaccccacgtacctccttcaggagacccacagtcacatccagaccccaagatgggcagacccccttctgtgcatacccaacccccctagcaaggggaggtcatagcttgcacagccagaagaagccatgacccattatgctctaccggcctctgaagggctacttttgaatgtgggtgccacattcttgggggaccttgcctgccccctaagacctggcatgcagagccagtcgagggccagacgaggcccttggccttcgtccccccaaggccttccccctgcacctgtttggttgtaatgcatccagttgagcatgatctcaggtgcccggtaccagcgcgtggccacatagccggtcatctcctcgtccgcctggcgcgccagcccgaaatccaggatctggggcgaccacgtggtgttctcaagctccgcacgggctccgccgccgccctgcccacccctgcccacgggcctcaccctgagctacagtcctcgttcacagccacgttgctgggcttcaggtcctgcaggtcacgcggagcgtgagcacaggaggctgggacggagccctgctggacccgaccctcaccctgcggtcgcacctacccggtggatgatcccggccgagtggatgtactgcgggagggggattgtggtgagcgccgggcccggcccgcccgcccccctgcgagaggacccgcgaagcccagggcgccccaccttcagcccgcgcagcagctggtaaaccaggaattgaacgtgctcgtcgctcagcgcctggcacttgacgatgttgttcaggtcggcgcccatcagggtggtcaccaagtacctggggcggggtcagggggtcaggacagggccccaccggcccaccgcgaacgcgctccccgctgcctcgcccgcccgccgctcacacttcgctgaagtcctcgatggacgtggccggcgtgaagacgtccagaagcccgatgacctaagtggcggggggcgtcaggggccgggcgacgaacccccggctgtcgttcagcttcccccgggccacgcccccagtgccaggccgcgcccccctgtgtccccgccccccatcgccagggctcgccccgccttatttgtgcgccgcggccccgcccccgcacgcgccctccccccacggccctcccccggctcacgtnancgtgcttcaggtgcttgagcagccgcagctcccggtacgttctgcgcgcgtggatcagcgactggaaggggcgcagacagcttcatnaccgccacacttctggcnncgccgggcgtcgtaggccgaactggaaggcgggcgagtnnnccggcgccgggaggggcccgagg

SEQ ID NO: 554 - DNA, 1685 bp, Homo sapiens
aagaacctgatgaagcagcgcgcacagagatccttttgagaaaattccaaagcgaggcagcaatggcagctccaaccaaatgccagctccgcggaagattagtcctgctatgctcgctcctggggatgctatgggaggccagggccagtcagattcgctactcagtgcctgaagagacagaaaagggctatattgtgggcaacatctccaaggacctggctctggagccccgggagctggcggagcgccgagtccgcatcgtctctagaggtaggacgcagcttttctctctgaacccgcgcagcggcaccttggtcaccgcgggtaggatagaccgggaggagctctgtgctcagagcccgcggtgtctggtgaactttaaagtcctggttgaagacagagtgaaactgtccggaatagaaatagaagtacctgatattaacgacagcgccccaaagttccaggccgaaagtctggaagtaaaaattaacgaaatcgcggttcctggagcacgttatccacttccagaagctattgatccggatgttggcgtgaactccctccagagctaccagctcagccccaatcaccacttctccctgaacgtgcagactggagacaatggagccataaacccagagctggtgctggagcgcgcccgggacagggaggaggcaactgcccaccacctggtcctcacggctcggatggcggcgagccgcgtcgctccagcacagtgcgcatccatgtgacagtgttggatacaaatgataatgccccggttttgctcaacggatttaccgagttaaagtccttgagaacgtgcccccaggcacctggctgcttactgcaacagccagcgacctggatgagggaatcaccggaacagtggcatacaaattctggaaaattatgaaacaatctctgctattccagcttaatgaaaatactggggaaatatcaacagcaaaaagtctagattatgaagaatgttcattttatgaaatggaaatacaagctgaagatggtgggggattgaaagggtggacaaaagtgctcatttcggtggaagatgtaaatgacaatagacctgaagtgaccattacatctctgtttagcccagtgagagaagatgcacctcagggaacagtaattcttcttttcaatgctcatgaccgagactccgggaagaatggtcaagttgtctgttctatccaggagaatctatcttttacattagaaaattcagaagaagattattacagattgttgacggcccaaattcttgaccgagaaaaagcctcagaatataatatcacggtgactgcaacagacagaggaactccgcccctgtccacagaaattcacatcaccctgcaagtgactgacatcaatgataatccacctgctttctctcaagcctcctactcagtctacctcccggaaaacaacgccagaggtacttccatcttctccgtgattgcctatgaccctgatagcaatgagaattctagagttatttactccttggctgaggataccatccaagggtctcctctctccacctatgtctctattaactcaggcactggcgtgctgtatgctctgtgctcctttgactatgagcggttttgagatttgcaaatgcaggtgacggcaagtggcagtggaagccctccaccacg

SEQ ID NO: 555 - DNA, 1955 bp, Homo sapiens
  misc_feature 1702: n = a,t,g, or c
ctccctctgcagacacaacgagacacaaaaagagaggcaacccctagaccaccgcgaaggacccatctgcaccatgaccgagaccaccaagacccacgttatcttgctcgcctgcggcagcttcaatcccatcaccaaagggcacattcagatgtttgaaagagccagggattatctgcacaaaactggaaggtttattgtgattggcgggattgtctcccctgtccacgactcctatggaaaacagggcctcgtgtcaagccggcaccgtctcatcatgtgtcagctggccgtccagaattctgattggatcagggtggacccttgggagtgctaccaggacacctggcagacgacctgcagcgtgttggaacaccaccgggacctcatgaagagggtgactggctgcatcctctccaatgtcaacacaccttccatgacacctgtgatcggacagccacaaaacgagaccccccagcccatttaccagaacagcaacgtggccaccaagcccactgcagccaagatcttggggaaggtgggagaaagcctcagccggatctgctgtgtccgcccgccggtggagcgtttcacctttgtagatgagaatgccaatctgggcacggtgatgcggtatgaagagattgagctacggatcctgctgctgtgtggtagtgacctgctggagtccttctgcatcccagggctctggaacgaggcagatatggaggtgattgttggtgactttgggattgtggtggtgccccgggatgcagccgacacagaccgaatcatgaatcactcctcaatactccgcaaatacaaaaacaacatcatggtgggtgaaggatgacatcaaccatcccatgtctgttgtcagctcaaccaagagcaggctgggcctgcagcatggggacggcatgttgtggttacctgtcccagccggtcatcgactacatcttcaaaagccagctgtacatcaattccttcggttagagcccttctcctccggcaacacaatggccctcaatctttgtcagccccctgtttctttcctgcttctctgtttctccatctcctcgtcttgactgttttccctacttgctgacttaacccccccatagtgtgggggacctgcagagaaccatggcattccctattccacagtcatctttggacagactttcctctagtctccgggttgggggtgggtgagggaatggggtgggagtcgggggaagtgcagtccttggagatgtactggtgtccgtctcccaggcatgctctagagaggcggctctgtgcccatcctcccagcacgctctggggaggcggctctggtgcccatcctcccagcatgctctagagaggcggctctggtgcccctcctcccagcatgctctggggaggcggctctggctcttgccttcccagcatgccctttactacaaagggctatttttcttttctttcttttgtttatttatttttctttgttcactccctgtagaacttggatgaaatcagtgtccatggttctttatgtttgtagtcttgatgtgctcctgtggtattacttcccctctgataggacattgtagccagcctcagcactcagtgagttcatcagggccacacccagtagagaaggccaagcaacctccacttcttcagcaccacacacacgcacacacacacacancgcacatgcgtgtgcacccgcgcacgcacatacacacacacatatagcagtagcagcagcagcagcagcagcaacctttgatcaggagtgagattttcgggttctgaaacctgggacacgagtctgcgaatagtcggttttctcagaataatttgaatctgttttcttagtttcaaatgaccatttccctgatgctctgagtttatgatcacacagagccagtccatcctcatttcctggtggcggcaaggct

SEQ ID NO: 556 - DNA, 621 bp, Homo sapiens
cttttacatagcatcttctttagaattttacattaagacaacattctggaataggcataaagatttatgttcaaggatggcagttgcagattgtcttttatttttcagttgcagatttttatgataaatattagcaatgtactactcaaggctcaaggaaagattagttacataatttttggggggggtaattgtttaaaataggctgtagaacaagcttgtccaacctgaggcccaggacagctttgagtgcggcccaacacaaattcataaactttcttaaaacattatgactttttcttgcgtttttttttttgtacctcatcagctatcgttagtgtattttatgtgtggctcaagacaattcttcttcttccattgtagcccagggaagccaaaagattggacacccctgctgtagaaggcttcaatgagaaatcattcatagtgcaatggtctttttgttgtgacttctcaggatactttgagttaaaagattataaaaccagacagacagtagccccctttgaaaaaaaaaagtatgtatgcattaaaaaaaaaactagaaaaatttataaaatgtgaaagcatttgtctctggctagcaggattcagagaaaa

SEQ ID NO: 557 - DNA, 2823 bp, Homo sapiens
gtatttgctaggacaatcttgaattgagaaatacaaaggtgactttaggttagatagaaggacgtttttatgtggtgaggataatggatttttttctgatcggttaattcactgtcagcttttgtgcgggaacatcgctttggcttgtttgaagctcaaggagcctaagaagtttgcttgctaaggtgaaggtactttcttcgtactggttggtgtttattacattcttgcctgatataaaaagcaatgggtcacagtgtaggggagtagcaaaagtcacttaatattggggcaggcttctaacaacatgcaggtaacagtcattaagaaagtcagcttcttagtcttctagatacttaatatgaagtttgctggctggtttgtggctcttgaatatgttagattactgatattgttaggctgatagccaaaatctaggtgaaatttctcttgggctctaaggcaaaggtaagactggttcaccttattaatgtattctaggacaatttcctggaattttaaacacagcatactttccttttttttttttttaaaaaaaaacttactattactgattaaaataaatgtcccttaaaactcaatgtaaaaatgtatatttttaaaatggcactttaaaattttaggtagagtctatgatttaaattaactagtaggttttggaagtgaaatcttaaagtgaagttttatgaaacttatgcaataggttgaaatttttctagggtttatactttaaaggtagtatagtaatgtagttttaaaaatactttttaaaaaaattaggagagatgctgattaaaagtttaaaaagtgtttcaagatgaggaaagagatcttaatgaattctgcttgttagttggtttttttttgcttgtgttcttaaacgtttgctatgacagtagaattcagcgtctttacctagcaagagagaattttgaacatgtaaactggtagtcagcagtgaaaaagcctcatccattttttacattttttttacataaatagggagagtgcctgatttatatgtagggatattggcttttgtgtgggtgggtttgctccgtttgtctaaagaggacaaaatttgctgcagtcctgagaagcttcattttaaagtagcggaacttgttaatcagctggatcagcagcctgtgacctcactagcagatgttgtcccagttaaaaagatcacagatcaagttaaaactagcttaaataacattgagaggtggtgttcataaacaaaatacattagtgagtagaagaagaatagatatttgatgtagatattgttaaataacaataaatcctgagctaatcactgagtattcatcttttccttggaagctattatttcctaagactcattgtactctattgggtaaatgcttttgcatttctctgtggaatacaagctattaattagagtaaatataactggtgtaacgatctgtgtttttattatgtatactcctggggataaagaacacattggtatttaatgttaaagagaaggattatgtatagtagaaaagaattcttcttggtaaagtacatgcaaataaacctatgaaaggtttatttgaagatagtagcttgttttacctggcatttgaagtaataacacagtgggaaaggctttaactagaaaatctcacttcactaactatcttgaaaatctttttctaaactgaaggatagcaccccttacaaacagacattaaaaatgattgatcaatcttggtaagcaggtgtcaaaattaattggttggctccatggtaacttagctttttttctactatagggatttcgccagggaataaaaatgttcttcaaatgtttcttgaggatagaagattgatagttgggggaagaaatgcagaagcaaatatagtatcaaaagtggtacttcagttctcttagcattgattccagtcttctgtttccatttgaaaagaataaagcactcagaataccaagccattccttccttacacaggtaaaacaaaaggaacattgatttttcacccaaagctagactaaaggacttgggattgagaataggaaaatatatttgaaatataataatcaaagatacagactctaattcaagttgtatttatttgaatagttcagtgtaatgttaagcaagaaaatattctgctataatctatttgaatgacgttctcttttagaagggagcccttgagaattaattttgtagagtagagatttatataaatttatataaatataaagagtattgctctttatattagtcaaatataaaggggtatatttttacccctcttaggttagtcaaatttggatacttcatttcacgcatttaaaatggaagtatgctgggtgccgtggctcacacctgtaatcccagcactttgggaggctgaggtgagtggatcacttgaggtcaggagtttgaagcctggccaacatggtgataccctatctctactaaaaatataaaaattggctaggcgtggtggcgggtgtctgttgtccctgctactcgggaggctgaggcagggatctcacttgcgccccagtggtggagattgctgtgtgctgagattgtgccgctgtgttcctgcctgggctatggtgcaagactccttctctgataaaaaaaaaaaaagaagaagaaataaagggcatccaaattggaaatgaagatgccaagttactcttgtttgcagatgattgttgtatttggaaaagcctaaaaactccaccaaaaaatgattagaactgataaattcagtaaaattgcaggattcagtttg

SEQ ID NO: 558 - DNA, 2839 bp, Homo sapiens
  misc_feature 1287,1307,1320: n = a,t,g, or c
gctttttcatggacaaggaaactgagatcaagaaacgtaagtcatttcccaaggttgagtttccaatgctttcctgaaaccgtccttctttgttggaggttattgttttcctccgggaggccccatgcactgctcgtgcctctttttagcactgtgtttaacattccttcattagactgtgagatttgggagaagtgagtccatgtctaacttctgggggctggtgtagatgctaccccacagcacatgctccacagatgcttgtgggagaatggaaaggaagagaggagagagaagaaagagaaggaaaaagcgtgggtccaaagcttagcagttaggtttatcaccggtaaacatggtggccagcagcatttgagaccccaatcctagcaagaaggggtactgaggaacacacaccagtgagcttctcggcttctcgtggatcctgagattatggtgtaggctttcccctccttttctgtctcctcctggcttcatggaataaattgagccacagacacaaacataccaggtctccccctggagccagatcttatgcccccactgaagacacccacttggaagagtctctgggttccataaatagcacaaaccagaggtgccccactgtctccctgggaatgaggaaaggaagaacagtctgcagtcaatggcacctccagcaggaacagggaggggaaaatgggagggtcctagtggtgtaggctagggccccccatttgggaactagaaagtgagggggtactggagggaggaagaggctgggcagggtgagtaccttgaagataccattggtgcctggttcgttccaagcacaaatcatgttcctggacagctggtttaccctcttggcacattctttccggctaatctgcaccactctcagcttttccaggtgcatgtttaagtcatcatattggtctgacaaagggagaaagctggtgtgagagtgagcaccgcatcagccggcaacagtgaacagcccacacgcgatcagcatggaagcctgggagggcaccaacgttcagcagatgacaaattcacagggcatggaggcctgggatgacttcagtctccacttcaacagccccaacaagaagttcctccactaaatgtgcttcctgtgggaagctcactctcttcagaaacagcccacaaaagccccagcctggaatgaaggtcctccctgggccccccatctcttcacagccaggctttgccccatgccgaggatcatagcaagccaacctttgaattggcgtagtncagatgtcttcaccaacccnaatggggaacccnaaaagaagacacctctgggcatgccaccttgtaggaaggaactgaccaccatgccaggggcactcttggggctttctcccccaaaacactcccaacccctcccaagagattttcccctggccaggcagcttggtgccttgcagggaaaaggatggagcttggttgaagaatcactggttcagagctatctttgggatggtgttttacatggggtggccaatagatgggaagatggccatcgtgaaagagccacaggcgggaagatgcaaactggcttatcatgcttttggcaccacaaaaattatcatcgctctcgtattttgagattcttctatgtcctaggcttttactggggacctcatttaatttaatccccatacctttttgaggaggtgttcctggcattctgcagatgagaaaactgaaggtgaggaaggtgaaggagctcaagagagttaaaaccacagttcagacccaagcattaccgcacccaaagcatcatgctctctagcctagggtaccgtacattggggctttctatgagttctgaaaagagggcacgtaccatacccattggtcgttacccactgtgccatccaacaccagtcccaggtcctctcctcctcctgcaggcagacaggcattttgaaattgctgaattgcactggtgtggcaagtagaagcagagagaggtcactgtcgagctggggcggtttgtaatatttgtgaataatgaccttctgcacttgctttctctccgagtggatgttgctgaatgttctcgttcccatgaccacagtgacatttaccacggccatgtctaatctaaagaacgaatataaaaacaccagtgctaacaagggtgactgatagtgcaattcacatttgtagacacatctgtaaacagtgagttgacaactaaggagaagtccagtgcagtgggtgagctacagtggtctggagcatggctaggatcagataggtaggaatcaggggcccaagctctgacaaatctctgaaccaatgggttgacagtccagggaaactctcctgaccaaaagaagaggaatgaatccctctgagagatgagattgtaagctccttgatgacagggaccttggcagtgttgtcaactcctatgtccacagcacttggaacagtacatagtaggtgctcagcgggaaggtgttcaatcaatgattccagtgtgttgtcttcatacacagatgacaggcaggacagagtgtattggatgtactgggtgcatagctctgactacagcccacatttggatatgattggctaaataaaggggagggagtgggtgtacagcagagaccctggggtacaaagcccatgcaacattttgcacatagaacctagggcttcataggcctgtgcactggcctactgagctgcctagcccagacaatacattgacaagacgggatgtagatgaagacacttacagggttcttcggaagcagtgtgcggctgtcagaacccaccaccacgaaac

SEQ ID NO: 559 - DNA, 1631 bp, Homo sapiens
  misc_feature 1261,1262: n = a,t,g, or c
ggaggagctggacttctttgacttgctctcgggctgtggagtgccttcttctttgccgtctgctttgagaggcaggggcagtttggattcaccaggagacatcatatctgcaagacccacagatgctgccgagctgttcaccatggcgggcgccatgctgtagggcggcgcctgcgtgttcatcaggctagagctgttgttcatgggctggctgtagggagagctggaagccataagtccactctggttcatgccggggaaactgccttgcctgctttgtgctgagttcgcagcagcctgcatcactgctgcggctgcctcctgtgccttacggttcacagttggcattggcggccccattcctggccctccctgctgagacatgccaggagaactgggggtcatgctgctcatatttccaggaaatggtctgttctgcatcccagctgatggcattcgtcccaggggcacagcaccacatggctggcttggcccttgtccatgcatctggttgttggcactgatacccataccgggccctgggccgctgtagcttgcactgggcaccccactatacgctgggggtctggagtagttaccttgtggtccatactggctcatctgtggaccgtaagtcccacttgagttactctgctgaaagctactgattccagcatgcatctggcccccaggagaaggatgaggcgacatggatggtcctgtctgttgaggtccatactgagccatctgagggtttctttgtgtgcctgccataaaacctctttcctgtggcattggtgactggctcaaggcgggatgggaactggattctgactggctcccgggtggctgcggaggcatctgactacctgggatacttgcaggagagattgggccagatcgagactggttgcttcctacaggagagccaacaggagagggagatgggccccccgggatgctggagagatgaggggacgcatgtggggagaaaggcgactgcgccgggttgctctgatccccttggctgctcgtggacccggatgcactgactgctgagctcaaagttgcttccgttcccgtggggaggtcatcaatggagccagacagatctggtaaacttgatggtctttcttgctgtattaagttcaagtcttcatggttaggttttccgggggccagaggaggttgagatctagttccatagccttcctgagacatgtcctgctgcggctggtacctctgctgggactgggacggnngatactgcgcctggggtgggaggtgcgggggctgcggctgctggctgtaatatggctgttggccctgctggcagtaaccactcacaccttgctgtccatactgaggtggcatctgctgctgagggtactgcattccggccatggccccgggagtccgaccctggatgccaattggataccgctgtggcctggagggccataggaacctcctgggtacggactgctctgctgaggctgagaatgagggttactgcccatgccatacaactgaggtctcttcatcaccattggatccattgggctgccctgggatctgcccatggtcggtccgggggtgccgggctcatcgccgggtgactcctttgttgc

SEQ ID NO: 560 - DNA, 2214 bp, Homo sapiens
gcgggacgcgcgcggagtcgcgcggcgggcgggacctggccgagctggagggcgccggggagcggggctcgggcggtccccgaggcccggcggagcgggcttctggggtgtctgcggcggcgccgggggaacgggctggggatggggcgcctagccgggcggtggccggggcctcggccatgttcgcggggctgcaggacctgggcgtggccaacggcgaggacctgaaggagaccctgaccaactgcacggagccgctcaaggccatcgagcagttccagacagagaatggtgtgctgctgccatctcttcagtcagccctccccttcttggacctgcacgggacgccgcggctggagttccaccagtcggtattcgatgagctgcgggacaagctgctggagcgagtgtcagccatcgcttcggaggggaaggctgaggaaaggtacaagaagctggaagaccttctggagaagagcttttctctggtgaagatgccgtccctgcagcccgtggtgatgtgcgtcatgaagcacctgcccaaggttccggagaaaaaactgaagctggttatggctgacaaggagctgtatcgagcctgcgccgtggaggtgaagcggcagatctggcaagacaaccaggccctcttcggggacgaggtttccccactcctgaagcagtacatcctggagaaggagagcgctctcttcagtacagagctctctgtcctgcacaactttttcagtccttcccccaagaccaggcgccagggcgaggtggtgcagcggctgacgcggatggtggggaagaacgtgaagctgtacgacatggtgctgcagtttctgcgcacgctcttcctgcgcacgcggaatgtgcactactgcacgctgcgggctgagctgctcatgtccctgcacgacctggacgtgggtgaaatctgcaccgtggacccgtgccacaagttcacctggtgcctggacgcctgcatccgagagcggttcgtggacagcaagagggcgcgggagctgcaggggtttctcgatggcgtcaagaagggccaggagcaggtgctgggggacctgtccatgatcctgtgtgaccccttcgccatcaacacgctggcactgagcacagtcaggcacctgcaggagctggtcggccaggagacactgcccagggacagccccgacctcctgctgctgctccggctgctggcgctgggccagggagcctgggacatgatcgacagccaggtcttcaaggagcccaagatggaggtagagctcatcaccaggttcctcccgatgctcatgtccttcctggtggatgactacactttcaatgtggatcagaaacttccggctgaggagaaagccccagtctcatatccaaacacacttcccgaaagcttcactaagtttctgcaggagcagcgcatggcctgcgaggtggggctgtactacgtcctgcacatcaccaagcagaggaacaagaacgcgctcctccgcctgctgcccgggctggtggagacctttggcgacttggcctttggcgacatcttcctccacctgctcacgggcaaccttgcgctgctggccgacgaatttgcccttgaggacttctgcagcagcctcttcgatggcttcttcctcaccgcctctccaaggaaggagaacgtgcaccggcacgcgctgcggctcctcattcacctgcaccccagggtggccccatctaagctggaggcgttgcagaaggccctggagcctacaggccagagcggagaggcagtgaaggagctttactcccagctcggcgagaagctggaacagctggatcaccggaagcccagcccggcacaggctgcggagacgccggccctggagctgcccctccccagcgtgcccgcccctgccccgctctgagggccctccagacctgctcgggtgctggggccatgccgagtcgcggccctgctcagccggaagaggctcccggacctggatgtacagggcagtctctcttcccggggctatggctgggcctgtcctgccgtcatggccccctgcttcctgctccttggagctggctcccggaccttgcccaccatccatgcagtggctcccagggcagagcctctccttgtactttggcagccatagaaagcgtgctcattttctgttttcctgtgttaggaaaaaaccaccaccacgaaac

SEQ ID NO: 561 - DNA, 2098 bp, Homo sapiens
gtggtgggggtgtgtaagtgatgcatgaggataaacattcttggaaggacgcgtgtgttctgtgatatgtcttgattggctgggcggtcaggattgcgtatggttttgtcattgcatgcttttgtcttgtgtgtgactgagtgaaaatatggtgatagtgtgggcaatggtgtctgtgcagagtcccctcataggagggacatcagaacagcccctcctcaccagtggctgccccagcaccctcaggaagctgtttcttgggggaagatgcagaaagaaatgaagtctgggtacatgtgtacttggcaggcaagaggagagattcaacaaccccagagagaccaggacaaaacaggctggtgacaagggacaccctctcacccagctagagagaggccctgggatacgagcaagaggttgcagtgtctagatgatttcaaaggctgtgtttaccaaatgtttgtcctggaaaccagcctgagtgcctctctgccccaaaaaggagatctcagtgagcactgtgggtgccaagtcagggctcaggctcatctcaagccccaccctatcttccaccaccagccaatcaggagctttcttcctcccatccatctgacatgaggtcctgaagccccagactggtggcagggatgaggggaacaagagatgagctcgtaagggcacagtctggggcagatggcagcagcccctcttcctcggggaagatctgtgtgaggctggcagcctgggcagaccttgggagagagggcagagaagaactggggccaggttccaggcccagtcccaggcttgggctggtggggccaggctggggactggacagcagggtggtgttgaggctgcagggaggcactgtggctccactaggcatagaactcctcctgcttgtcaggcttctggtatgtgacgctcgcctgcttgggttcctccagcgtgtagctgccctcatcctttttcttcatacgatagatgagcagtgtgaccaagaaggcagcaaagagggcgcccaccaccccgcccacaatcacagctacgagcacctccttccgctccaggatactcttctgaggcagctgagcagctgagctgcccgagtcgatggcattgtccaggaggccagggcccgggcgggcacccttgggcagtgtcccaggtggagatgatgccttggccgcagcccctcccacagctaccacctcattggctgtgtctggttgtgtggtctcttcttctggcagctcgaagtctccactgggccccccactcaccggaacctctggctcatcccggattgtggtcaggaaggtctctggagttggggtctgagccacctctgtgggtccaggggcagtggtccccaggggcagggtgctcctctcagggatgtcaggctcctgggtggtggccggcctgggaagggctcttggccgggaggtagctgtgctgaccagcctgggtgttggggcctcggtgtccaagacagccgccgtggtgggcggggagggcgcctcgggggtagtggcccgtgccgtagccactgtggtcagtgggagaggcagaagcctccgtacgccagtggtccttataacagcagtggtggccgtaaaagggggtgctgcaggggtgctgggggtggcggtggccactgtggcaggcactgtggccacagtcgggtcccctgtgcttgtggcagcagtggtagccatggtagtggagacggtggtggctctctggctgggctcttccgggacttctgtcaccaccagggggctggtggctggctccagggtggggcgctcagaggggagctcttcaaatggtgtgcccacaggctggatgttcgtggtgggcagcaccgcaggtgtggtggacaccgccagggctacatctgggctgaagcgcatggctgtctcaatgcccgactcctgctcgaagtctgagggggtgggggagagggagagagctagggagctgggtggttgtgaggggcatgaggatcccaggtaagcaatggccatcaagattaggtctcccaaccccctctctttacccaattttcccagaaaagatgagagaaagg

SEQ ID NO: 562 - DNA, 1684 bp, Homo sapiens
  misc_feature 1471: n = a,t,g, or c
ctaaagaggactcatcattgttctgagaaaacaaaaatccgggacttctaaaaataactgctgattgccttggagttgggctggtgcatatgaacaatttacattctgctctttgggagctggtgactcttctggaaattggggctcttttagtggacattgttgatgcaggcatagttggcttttgtttccatgtgcttctcagaaactcttgctctgctccgcagacatttgtatgtgtcaaagaagtatatggggctgagtgcagtggctcatgcctgtaaccccaacactttgggaggccgaggctggaggatcacttgagcccaggagttcaacaccagcctgggcaacacagtgagatcccatctctacaaaaaatttaaaaaatgaaaaagaatcagatgggatgagagagtccataggtcaggttctccaagagtagttttcaggagccatgtaagtggccctagagattctgaactttaaaatgttaaaactgctttgatttcacagacaccctttcaaaagattatctcagattactggaagactttcttgttaagtttagagaattttgcattttgcttagaaatcattttcaagttttattagaacatttactagcaatggtgctaattattttaaatatgaccctggaaatgggctatgtcagcttgaaaagactatttttaacggaatttggttttaaaggcaggttttatagacattatagtaataccgttgttatctaattagcatccactgcgtaaatgtacatgatattagagaggcaagtatacataaaattataaattgtgacattttatgagttttttttttattatgagtcttctatagtcatcattacttaacagtgtgaaatgtggtcttagacattacatcatgtaaagaccaggagacaaaaaaaaactgaggatcaatttttgattataataaagttttagtatgaggcatttctgaatatgtgtcatgaatatgagtcatgattttcacaccaaacctgacctatttgaatatgcttcaacttcatgggggtttcaatatttaaattctaaaccccattctaaggtgttcaaaatgattcacattcaaacctacttttatgtgttataattaaataagaaaatattgcttatacctacatttttattattcttgggcatattataattatttctttaatttcaccaataaaatagcccatttcttcattagtaaattatcaggctatctcaataaaaaaattagtttgaatgtggcttgccatctcaaagagtcatttcaagtttggaattttctcacttttttcatttgttctttttgtaaaatgtgaagatactttctaggtaaattaatcccttccaaacggtaaaataactttcttcttggaaagagttattacagtcttattctttgcaatcttcaataccacttaggttagcgtgancaatacatgaaaaaaattacactagttaaaaaaggaatggttgcgacctaggccaagtgcattgcaattatatgttcatggaaaagtgagctttctactgggaagagcacgatatagatgcccatgaaatttccaaagtttaagtatttttgtaaattaggttgtgcctagttaggcgggtggcgccgcttttttttttttttaggctgcttt

SEQ ID NO: 563 - DNA, 1688 bp, Homo sapiens
  misc_feature 1654: n = a,t,g, or c
gtatttttaaacttatttatagctggcaaagtacttttttgtatgtatttttatagcaccattgcacttctcatgtttgttgcaagcatctcccacagcttcctttgtcttttaattttatgacatataaataaaagtatacatttcaatatggccatattgattgatcttttcctttgtaactcttactactttatatttaaaaagtcatttcccagtctaaggccacctctattttcttttagttttttaaaatggtttcattgttttatatttgcctatgatccagacattagtaactgtgggttcttaattgggcttcagagaatctgagaattccttaaaattctctacataattgtacatgtacttaatacatgcttttttccatgttaagagtccagagtttttgttagatcctcaaaggggtcagtcagtctctcctcccacttccaaaaaatgtctgagactactactataatccatctggactttatttgggtaaaaggtggtacggtgagactcatatttttctttttcccgcaaatagttaagtataccaaccatttagtaaataattacctcctgatttgtgatacctttgaaaaataaatgtttttctttatttttatctccacagagaaagttagagaaattcaagaaaaacttgatgctttcattgaagctcttcatcaggagaaataaattaagtgagtaaaaattctctaactgtattggtgctgactaaatacaaaattacacttttcttaatagttatcattctgcttcatttacatcctgcttgtcacttatgctgtaatttcaatggcatgaatctctgaaactagcttccgaatttcatttgtataacgttgctttgaataacttgattgccttctggctgaattaagaatatcctctagaactcattttgaatagaccaaaggtgaacacagagctaagatattgtataatatgcaggtgactcattttctaggtgtaaagaattgagctgtagttgacattactttattcttcttgcctatagtctatcaataatgatgtgtatgttaaatatttaacttagaaagttttctgtttgacttaattaaaattttaataattgttcttaatccttatctcttttgtttaaaaacatttagataagtgtttttcctacttaatttatatagccttagaatttagtactccttgaatttactttcttgtctgattctgctttctggcattagaggcatgttcctaataaaatacatatttaaggacttttccttagtagcataatcaattaattgttgctgaagaattttaatcagtaagtcacttgcttgagaggagaccttgctctgccacccaggctggagtgcagtagtgcaatcactgttcactgcagcctcaacctcctgggctcaagcggtcctcccacatcagcctctcaaggaactggggccacaggctcatgccaccatgcccagctaatttctttaattttttgtagagaatgggtttcaccccgttgtccaggctggcatttgcttttataaaagaagttgaggaaagaaaaatactgtagttaagtcattatcacttcaaaatattttgtcacttttgtctgtgacccttaccctacagnaccgcctgcggcaggctcagaactagaacggcag

SEQ ID NO: 564 - DNA, 1028 bp, Homo sapiens
gcactgacttcgtaagtctgtgtgttggggcagagggaatagcggtccctttgattccagccccataaaccagaaaatactgcactgaaacaagggctgtgaaacattcctcaaataagtatacagccaacctaggaacgcagtaggaggggtgggatttttatttgatcttttggtatctgggagacattttatatataaagaataaaaaagtattattattcaaatgtatagattcgatgttttcaatggatagcatgtctatactgtgtttgtactcttgtcttcagaaattcagtcctcatctaggcaaaaccagcacaaggtttcaaggctgttctcagttttaaatgcatcccaatatgccccgggaaatgaagcctttaaataagctttatctcttcctagtttaatatttctttcccttttaaagaaatagtgaggggaaaagaggaaattcactcctttagagccacaatattctcttataatctgtttcctactgtaaccacacatacacgcgcgcacacacacacacacacacatataaatttatattaaattcatgagttgaatatcttagtacttttacttctgtttaatttgacaaacatcaaagtgattgcctcatggaatgccaatgaaatcaaagcacttagagacaagccaacttggcaacattttgatcatataggcatttttcagttccttctcttttttatgcaagcagaaataatcttgggttagaaaattcacaagatcctagaataacatctctgctagattatctcttagaaatgaacatctaaaatgagtgtaaatgattgttgtctttgtagtgtataatgttctcaagtatatttttttataaatttaaacatagcttctcccagaggtgcctaaacaggtgcctttgcttctgtacccattaaacttcaataaggacagtgtgtgtgtgttgcggggaaggggggtcctgtgggctactgttgcattctccggtgaagataattgcaggattcagtttg

SEQ ID NO: 565 - DNA, 1790 bp, Homo sapiens
ccctgagcaagttaataaccttcctggaccgcagtttccttctctgtacaatggagatgagcacctatctcagaaggtggttatgtggctaaggaaatatgtagagccccgcacactgcctgggatgtgacagggcctcagtgaatggtgacccttttccctgctggaagtagatgagaagtgactttccatttggtgacagagcagagggtgctggcagagccagggcaagggcgtgcagggccaggctgcacggcagagacgttctgcccatggcaggaaggaggcggcctggtgatctgcccttgaacctgctcccacaccccatcccccagagtgccgaagctgcagccgaggccaccaagaatatggaagctggagccggaagagccagttatatcagctcagcacggctggagcagccagaccccggggcggtggcagctgctgccatcctccgggccatcttggaggtcttgcagagctagggtgtgtgactgcctcccttggcctcagctcctctcactgctgtgctgaggtggcctttgtcacttccttctgccttccaaccctcaccttcccccggcctggccccattggcccaccctctaagttgagcaggaaatcctccaccaagcttccagaactacagacagcacccagagtgagctggagtgggtcccatgcctctccagcatgccctttccctttgcaggagggtggagtccctgtttcatttcttcccttttcaactctgggcttcagagataaggcatttcctgggcagctttacctggcaatcctaatttgggtttaagactccctgtgaaatgctttccgcaccttaaccccagtgagcgtgaaaaagaaagttaataaactataatacatggaagcaagaaagacactgcttcctctgagggacttttcccaagcatgtaacaaggggcccacagccctgctgcagcatcatgacccatcttctaccaggaaatctttattaacctgagcccctaaggcagtgtcctcttcggtgggctgcttccactgagccccccgacccatcccctttcaaaaaaaacaccagatgaatgtaagaatggtagaggggcttttctcagcattgaattaataatacagtggctcctcgggagtcgaatgggcatttgggacaccagaaggaaaagaaatcatcatagtctaaggttcagttgtagatcaaaaaaatgcagccaggccgggcacggtggctcacacctgcaatcccagcactttgggaggccaaggcaggcggatcccttacactcaggagttcaagaccagtctgggcaacatggtaaaaccctgtctctaccaaaaaatacaaaattagccaggcatagtagtgtgtgcctatagtcctaacttgggaggctgagttgggaggatggcttgggcccaggaggtcgaggctgcggtgagccataagcatgccactatactccagcctgggcaacaaagcgagaccctgtctcaaaaaaaaaaaagaaactgcagccaagccagcccctaggtctctttctagagcgatcactgatggcaccagggtgagcaggggcactgtatgcatgtggagacaaacagcacatgcctggcacacatgtagggtagggagtggttaaaggcactggctgtcgactcatacacatgatctgaaatctgattctgctttaacccggctacaggagctaaggcctattttttagccctttgggatctgtaaaatcagaatgtacccaccaccacgaaac

SEQ ID NO: 566 - DNA, 1512 bp, Homo sapiens
gtgaagagcaggctgcctggactggccaaactgggtccaggagtgtgaacttctgcctttcccccgacctcaatttctggcaggcaccaaggccaatgagtgaaacgagtaatacaaaatgcctgtgcagctccacagcttattaccttccgtgggggaagcaacaatgttcaggtatgcagcacaggttggcactgcctagaagctgtctatagcttataggatccagttaacccttttgttagtcatgcacctcccctgcatgaaacaatattgttccttgcagcacaaatatgtcccaacctcctcctccccagatcatcagccccgaactgaagcaaaacagactttgggtagtctttcctctgtttactctttacttcatttgatcaattccaaattttttcataatgccattattattgagggaaggggagtaacttcaaggtaatccagagagaagcaaatgcaatacagttctgactgagatgcagattcctttttgttaaatgctgactgtgtccttggtttcccattcacctgggaagtagaagaataaaaatcattccatagttccatccaaggagggcagctgcaacagtgtgctcttgagcaggctgtctgggtcatcaggaaaagccattccagttactcacgcattctctgagaaaccttgtcatctctgccatctgtctctgtgtaggaactgccaaagtccttcggttccccatctcaaataagcagtgcatgggttacttccctcattctaatccttcagtccctccttgtgtccgtttggatcttccaggaagcagctttcaagatggagttagaagtacgagtaatgaggggtgattaccgtgaaagataaaggggagaggctgtaggggggaaggcctcagaccaccatgcaggctgactgtgaaggaaaggcaggggggatgagggaagactaagatgagcctcaggctacagtacagtaagtcctcacttaatggagttgataggatcttggaaattatgactttaaataaaataatgtagaacaaaaccaattttcccataggctaactgctataagaaagaagtaagttcacagcatatttctggtcataaaacacaacatcaaacttctaaataaagaccaaacacttcaatatttaacactgaaataaatgtttacatatacatttaggaatgattactaatactaatgaccaatactaggccaggcacagtggctcatgcctgtaatcctagcactttgggagcccaaggcaggaggatagcttgagctcaggagtttgagaccagcctggacaatacagcgagaccttatcgcaacaacaacaacaacaaaaaatttgacaggcgtggtgacatgcgcctgtagtcccagctactcgggaaactgaggtgggagtatcgcttgagcccaggaggtggaggttgcagtaagccaagattgtgccactgcactctggcctgggtgacagagtgagactttgtccc

SEQ ID NO: 567 - DNA, 612 bp, Homo sapiens
ccgaatctttcagggatactcctttgtggcaccctccattctctttgaccacaacaacgcggtgatgaccgatgggctggaagcgcctggtgctggagaccggccaggtcgggcagcggtggccaggagcgctatgatgcaggactcgcccttcttccagcagtacgagctggacctgcgggagcctgcgctgggccagggcagcttttctgtgtgtcgccgctgccgccagcgccagagcggccaggagttcgcagtcaagatcctcagtcgcaggctggaggcgaacacgcagcgcgaagtggctgccctgcgcctgtgccagtcacaccccaacgtggtgaatctgcacgaggtgcatcacgaccagctgcacacgtacctggtcctggagctgctgcggggcggggagctgctggagcacatccgcaagaagcggcacttcagcgagtcggaagcaagccagatcctgcgcagcctcgtgtcggccgtgagcttcatgcacgaggaggcgggcgtggtgcaccgcgacctcaagccggagaacatcctgtacgccgacgacacgcccggggccccggtgaaaatcatcgacttcgggttcgcgcggtt

SEQ ID NO: 568 - DNA, 2163 bp, Homo sapiens
ctgccattagacctgactccagaggaaccaccccttccagtccttggctcggtcttgtgctcagggccttccttgactacaccacacggttaaggctgctggtatctttcaggcagcagcaatccagacagatggccacatggcagtcctgctcttttgagctggcagcaaacaaaccaacccattatcttatcctcctggtacaggggctagaaggacccttctctctgctaccagagagattggcagaatcagggcctagtaagtgtagctgttacatactgtgatctgacttttcttagatatcatttaagaaaaaaaaaataggactctatcccagcataatcctattaattgagccttgcgagcaatcatatcgattcctattgaattacagagtttctgaattaaatttatgtctcctttagttgagttcttcctgaaaccatagtgtgccaaaatggaaaatggaacatttcatattctaaatcagggcccagaaaaagacctgtgagcccaatctgggctgttttttaagtaaagttttattggaacacccccacgctcactcatgtatgtactgtcttcgacggctttagtgctgcaaagacagaggtgagtagttgagactgcatggcccacaaagcctaaaatatttctgtctcaccctttaggaaaagttttgtccacctgttttaaaatatacccaggatcggttttaatcaggtgtcataagacacgcagacacagaaatgactgtcatgaaggtggaagttgtttttttttttaactcacagttccttggaaacaggaggcccagcacagcatgcagggccacacggggaggcgccggtcatctggagataggagtgaggggaagcatgggccaaagcctttgaggtggtttctatgggaaggcagggcagggggagcagccccctaccccagctagtgtgcataacggcagccagctcagaggcaccaggtaccaggtaccagggcctgtctccggctgcctggtccctggcctgaagtgcttagggcaaaggaacgttgcctcctggagagtaagagccagctggagagggtagtcaggagtgtagattctggattggctgctccgcataggagaggtgtgctgcggggcaaggcctttgccatctcttaacattggctcacctgggaggggcagcctctccccagtcagggaggtcccaggtgccagagccacaaaaacaaagaaaataagaaaacgcagggccagatgcagtgactcattcctgtaatcctcgctgagcccaagtgttcaagaccagacagggcaacatggcaagaccccatctctgtaaaaattaaaaataaaaggaaaataaatgaaaaaagaatatatagttaatacatctcccctttgtcagtggcagggaaattctgtacattcttgtactatgttttgttttgttttctaatctttctgtatttttctgagacataactttgatcatggtaattcctgtaaaacattttatttatacatccaaaagtagaatcactgagttcacgtttaaagaatcagtgtgtgaatgtgtgtgtgtgtgtgtgactctgtgtgtgtgtgagagagatgatatgtgtgcattcctggggtgtcacaggaaatgttagaattaggagcatatatttctcattttatatgatcttcaacgcaatctattaatatttttagttcaaaaatacttttttccctcaaactccaaatatttcatgtttagaactgcagaaccacatcatgttgtcctaggaatcaccgtgtttccaaggccatcgaagtgtctcatgtgggtgctgattgatgggcccgggaggagcatgggtgcccctggacaacaggtgcccactgttgagagcagccttgagattgtctgtcccaccgattgcaggtgcacatagcacctcgattctctaatgcctgatgtccctctccatcagattccgaaaaatggggcagttccttctttcccagatacaaaaatggtagtttgtggcaagatgagtggcctcagcatggcttgcacgaggcagaaagacacaagcctccactgctcctgcactcaaggacctgaaccagcgtgggaagcaatgggccgtcccccaccaccacgaaac

SEQ ID NO: 569 - DNA, 2541 bp, Homo sapiens
gtccccatttcttccccaggtattgaccccaagggcgctgcttaataaattttctacaagattaactttgtttctgggtctgtttcctgggaaaacccaacttgtgacaggctccccatttcatgcagagtaaataccaagtctttacaatgccttatattatttagacccttatttcctctctgacttctcttatgtctttctccttcacctatgtagctctagctaaataagcctccctgttagtctttgaacatgccaaaaacacacttatctcttaggccctttcctctagtagttccttttgcctagtatgctctttctctagatatatgcttggctaactcacttccttcatttatttgctcaaatattaccttctccatgaagtccaccccaatctccctatttaccatggtgacctaccacttcccttccctcttatcttgttctaattttcttttttataacagttatcaattttgacatcccacataatttacttattattattatttttttaattgttagcctccccttgcttgaatgtaagctccatgagaacaggcatcactgaatgctttgttcatgatatatcccaaatgcctagttaaagtgcctggaacaaagtaggcactgaataaatttgttgaacaaatgaatgaattaagtagatttaacagtaggaacaaagtgtgtgtaaaagagggtgatagagagggaagaatatgaatgagtcatggcgaaaatcacagctgtgaatcacctggacttcccccttggtgctactgtttctttcccatttctttatgcaaatattaggaaaaaataataattagactattacttggcatcaagagagctagtttcagtccagcactcttaccagctgtgtgaccttggtttcctttttctctttaagctttatctccttatctgaaaaatggaggtagtaacacacagcttccagtatcctgtgcagattaagatgtgcccaacacatactaggtgtccaacaaatgtttactgacatcccgacatcctccaagggcaaatgatttaaactaataatacaaatgtcttgtagtatgtgcttgaaaatgtaaccagaaaaataggtatacacattcattacattacatgtgagcttcaactttatgttatgcacctggttcatagatttggggtagaggaagaaatctgccccatttccatttaatcagtgacctcttagccactttacttgctttctaggataacaatagaaaaacatatttaaggccgggcatggtgggacatgcctgtaatcccagcactttgggaggctgaggcaggcggatcacctgaggtcaggagttcaagaccagcctgaccaacatggtgaaaccatgtctttactaaaaatacaaaattaaccaggcatggtgttgcatgcctttaatcccagctacttgggaggctgaggcaggagaattgcttgaacccaggaggtggaggttgcggtgagccgagattgggccattgcattccagcctgggcaacaagagcaaaactctgtctcaaaaaacaaacaaacaaacaaacaaacaaaaacatatttaaaaactccaaaaacataccagaaaacagcagaggtatagtgttagctgtgcagaacagtagagaagaatcacaggccctaggtttcaatgttaaacacattactgaattaatagctatggataaatgacatcaggtattccagcctttcaacttttttttttttttctctctagaacactccttcctcaaatcattgcatgggctggcttctttagttatttgctaatatccactcaggccttcctctgaaaaccttttgctgaagtagttcccttatttccgttcatctctatccattgctctgcttttttgttcttcatacaacttatcactctctgaaattatacacgttatttaggttatttgtctatatctttgttgcttttctcccctctatgaaaatgtaagctccctgacagaatggacagtatctatctcattaatcactattgggcaaatccatcaaaaagtagctgaatgaatgaatgaatgattgcattcaggataataaccctgctctcttaactgtccagtaatgttataaagattaacgagctctctgggaaaacaaactcagttcttagcagagattaaaagagctatgtacatctaaagaattatttaaataatttctttcacatttcagtaatagaatttctagacctatattcactagttacatgtcactggagcactgctaaatataaaggttaaccaaaaggacatgcggtttaccctcttgagacctaagggggattcccctttattaagcatctgtgctgcactatgttacatgctaaggatatagtttctcatatacttctaaacagaactgagtaaagagtgttactctctctatcaagaaggggaatagattcacaaagattaagtaacttgctagtatagagctagtaaaacctggaattaatccttagaaaa

SEQ ID NO: 570 - DNA, 2387 bp, Homo sapiens
attacagagattgggggagagtgtttccaaagaggagaaaaatgtaatgtaattcgcatgactaaattgagagcatcagctctgagctattcctggaggtaagttgcatgccagcatttctgttaaaagaaacaaaaaaggaagctgaatatgggatagcaaggctttttatatataatgagcagaactaaagaaccagaactggcagacagaggatgttaaacatttcacactgcacagaaatacagtccattcaatagatttaagtcaatccctttgtttaggcaaaagtttatgattctgctgcttttcgtacttttgatcccttgtccagaaaattagttgctggctaggattccttggggaaaacacaaagaattaagtggcaaaaatttaagtgatatcttctttgcaaaatcagttctgagatgagttggaaaattcaggcatttgcagatacagatctctagttacacagccataaattgtaaaatggagaggaaaagctatcagcagacacgctttggtcaaagttgtgatttgaacagctcctaataaaaagtctctcaggagaactcactaaagttgaggtactaaaaattgtctagtgaaaggcaaagagtatatgttgggggtctggatttcagacctacaatgagaatgctaactttaaatctgtagtccctttatagtgtcagatggtatcagtgtggttcagctggttttatcccacctttataatactcccaaatccttctaaaatgggaaaaacctatacaaaagtaagaggcatattggaagattcatttgctcccaatagtttgtaataactgaaacttccacaaaaatgaaaaattgaattaaaaaagttgaactcataaaagtagagagtagaatggtggttaccaggggctgagataatggattcagggaaggttgagaagatgttagtcaaaggatacaaaatttaatttagattgaagggataagtttaagaggtctatggtagaacatggtgacgataactagtagcaatatgttgtattcttgaaaaatgccaaaagaatggattttaagtgttctcagccaaaaaaaaaaatgataactacgtgagttaatgcatatgttcattagttcaatttagccattccagaatgtatacactgtatatttcaaaatagcttggtgttcacaataagtatattcaattttattgcaatttaaaaccttaaacatttttaaaagtatccaggactcttaacctaaggaaatttcagggtcctatgaaaactaccctaatctctcaaaagtgtcctgtagtgcttttcttaatttccaaatccctgtctttctggcttggcacatatttctaggatgggtagaagaaactttgatgtccagagttgcacattcctgagggaaattattccctccagaagaaatagaagtaacccccagaggtgatggattaggacaaggaattcatgagcaaaatagctacacagaagcagtgaccaaaatcgtcaaggaataaggacttaattccttttcaaaaccagttctccacaccagcatgcaaatgaaagtataatttaaagagggaaaatagattatattttaaaataatgttctcattaaagtttaattttaagaatagttttataaaatcatcccaaacttaaatgtctttacatataatcacaagagaatctgaggaacctgtagtaattcagttattattgctttgtaaccagttcataactctggggggacccagctccaggttattcttgcttctttaacttatttcatcctgacctaaattagtagccaacgttttcatatccagttgtgattggtttggtattcactgtaatgaacttctagtgtttagatgtgtggtttctttgatctcagtatgttagaggtagcaaagtttcctgaattcaagatgtccacataatatttttattgaggaacaatctcagacttggaaaatattgagagggttgtgtgcatatttcagtacccctgtttgttctcaagcatcaaatgatgagttatagtcatttcttcagtgggaaaccgcactcatttcacggttaatataagaagtcttagtgaagagcagtttggagcagctagaaatatgataggcatgcggaacaggaaccgctatccaggaagtctggctcagaagccccctgaagacatcttcagtagtttttcaaaagctatgtgtattagtctgtttacatgctgctgataaagaaatacccgagacttggtaatttgtaaagaaaaagaggtttattgtactcacagttccacgtggctggggaggcctaacaatcatggtggcggcaaggctaaaaaataaagaaaaa

SEQ ID NO: 571 - DNA, 506 bp, Homo sapiens
ctgcgtagctgggactacaggcatgtgccaccacgctcagctaatttttgtattttttagtagagacaaggtttcaccatgttggccaggatgttctcgatttcttgacttcatgatctgcctgccttggcctcccaaagtgctgggattacagctgtgagccactgtgcccagccctacattgactgattttcaaatgctgccttatattccaagcctaaatccactcggtcatgacttgttattatttttattattgcctaattcaatgtactaatattttgtgaaggatttctgcatctatgttcctaagagacattggtctgcagttttcttttactgtactaactttgtctggtttggtaaccaggataatgctggcttcacaaaacgagttgggaaatgtttggcagagaattctaccagtgaaaccatccaaacctgtagtttttttggttttgatttttgagtttttggtaaagttctaattatacattgaatttatt

SEQ ID NO: 572 - DNA, 2116 bp, Homo sapiens
  misc_feature 495: n = a,t,g, or c
agaaaatttcctacgattactagattgttcagaattgttttaagatcatgagttgatatttcaattttgttaaatactttttctgtatccattaagataatcatgtgtttttcttagtcagtcattgtagcccattgtattgcttgattttttttattaaggtatattcattcccatagaaaattcatggctttttttgttgttgtttgtttgttttttgggggaggggtggtggggggaagtagtaccactttattcagtgttgtaggaaatttcaggttacttcttaaaacgtggccaggtgcggcggctcgcgcccgtgatcccagcactttgggaggctgaggcagaaggattgcttgagtttgggagttcgggaccagcctggctaacatagcaagactccagctattgggatggctgaggtgagtagattgtttgagcctgggaggttgaggctgtagtgagccatgattgcaccactgcactccagcntgggtgcagagggagaccctgtctccaaaaagaaaaaatgaaaaaaaaaacacatacaaataaaaacaaacaaaagaaataaaaaattcccagagtaacaaagcaggaaataataattctataatccaaaaaacactgggtgatccttcagttggagagaggaggagtcagttaagtagctcacacagtagatatggacaaaccagagttgaggttggttgatgtggcttctaggagttaagttctccacctaaggcaattaagggataattaattgttcttgagggataattagtcatcttgaaaaaagggaaaagtttgattgggagagggcacctagggagggaggatggtgcatcacttaatattaaattgcctccctacactatgtggctgagtgtcatggaccttcctccctctctgcgcctttgaactcccactgttagcaaagttgaaaagcacacacttgtatctcattcttacaggcatgtgtactacccctcagggtccatagctgttcagtatggcaaagggcagacttgctttctcttccactttgctgccttgatgaggttaacatactggaatgaaagaggagggcaggacatctgccaaagtgcaaggaataagagttattgaaacaattgggaaaaggattgacacttcaggaagctgacctcgaagttgacctcgaactgttcactggtatttaatctgatgcttccctcaagtcctgaatactctttctggaagcagagaggtgaggccaagagttgttctggctcctccaggccacccctccccccccccagggcccatcaggtaagtgcctgcagaagctagaggcaagtcccagctctcttgtatagctgatgtatgccctgagacatactccatttgtaggattctcctgtgctccaattcaccaaattctgctgatggctcagagcagggtaaagcttctcctagataatccctcccccaaaattgagtcctcggggacagttatttattgaataacctcccaggttatctactttgggaaatgcagaaatgctataaactgaatttttttccagcagtggcagaagccagacaccttgaagtcaattgtccttcattctccagagttcccaagtggcatttcagagcacaggaattcactcttccacccagatattcctctcacactgagtcacgcaccccagtttctagcagcagatatcttgaagccaaccaccctaatgaaaaatgcgggtttccacaccagttttccacaccagctctccaaccattaagagtacacatgcccccatggcacacttgggttatcacaataaaaatacgtttatataaagtaaaaaacataatgtggagcaaatatatacatatacatgtacattgttagagttcaagtgaatatacagtttttaagtgtgtaaataaatttcatagcactacaaaaatacaagtcatctgagagacgtttacagtggtccccaaaactataggagagaataaaataaaatagctataggtaattaaaagctaattagataaatcaagtcacagtttcatccttcagattaaggtgctccaatataatccaccaccacgaaac

SEQ ID NO: 573 - DNA, 1986 bp, Homo sapiens
  misc_feature 1044: n = a,t,g, or c
gtccttttgtaaagtggacccttgccttctaaggtaatggtgaatgatacatattcccttcatttttctgctttgaagcttcaatcttcttcattttctcttttgatctgtcaacacaatcagaacatttagctctttgagcatctttaaggcagttgctttaaagtctgtctagtgagtcaatgtttggtcttcctcatgtccattttttgttggtttattttgtgcctttgaatggtcaatacttgtttctttgtatgcatcgtgattgtttttgttgacagctagacatttgaattttataatgtggcaactctggaaataagattattcctttttccccagggtttattttttgttgttgttttttgtgttgtgtgttttttgttttcgtttttgttttactgtcataggctgtctctgtgctagggatcagcctgtgttgaatgcctaaagttgtctcaattctttacagagcctgcgtttttccctgggcgggagcaagggctttctgaattcacctagatacacagttttttgaatgtccagaaaaacaggtttcatcccttttttctcctggaagccactttagccagttgggggttgggagaatggtagcttgcttctttgtctgctctttctctgtgatcagaagtagatatctgcaatcagaaccctgatatttggaggaagtggctattattgtccaccctggctgcagcaagctgacccagaaatgtggggttgtgtctccacagctgcctgccatggagtgggtggggatgggtagctgctacttcactgaaggctgaaatccaccaatgttaactgccatttaccactcagaatttcccctagaagctacaagtgttcagatggactcatgtgctcccaaaataatcactttaggaaccttctgccgatgtaattattatctaagtggagaggtggattcctgggcactccaagcaagtctttgattttccgcttctgagattctcaacttacttcagcccactattaatgttgggaagtttttacccngcgtcatattttattcccagggcatatctgatctttctccttttttctaattggtttgtttcataggtgaaatatttttctccggagcatgttaattatagtgtctttctgtgttattctgctcccctgcattatccctgtttcctttgagttgttttcacctgttttctgtctctcacactggaggctttcctgaagcctctgatgatctttgactatttatatttaagagcagggctctaaaaagctgattggaaggtgttttaggtacttcagcaccatccaacagtaatataatgtgagccacatacataatttcaaattttctagtagccacttttagaaaataaaacaggtaaaattaaaaatgtattttacttcacccaatatatccataatattatttcatcatgtaatcaatgtaaaaaagtattgagacattttgttttttgcactatttttgaaatctggtatgtaatgtgttaatctacacacaaaattttcatttgtaatacataactcacatttagatttataaaacgtagagttgataagtagattcacatagttcttccaaacatactttgttgttgttctaaatatacttaattttccaataactgaatcaagtatccagtttttgtttttttttgtttttttttttttgagatggagtctcactctgttgcccaggctggagtgcagtggcgcaatcttggtccactgcaacctccgcctcctgggttccagcaattctcctgcttcagcctccccagtagctgagattactggtgcacactgccacgcctggctaattattttagtagaggcggggtttcactgtgttgcccaggctgttctccaactcctaagcccaggcaatctgcctgtctcggcctcccaaagtgccgggattacaggtgtgaaccaccaccacgaaac

SEQ ID NO: 574 - DNA, 2059 bp, Homo sapiens
  misc_feature 974: n = a,t,g, or c
gcttttatagcagccagcttaataaaaagcctgcagtgcataaaattaacatcattgctgtgtacaatgaaaagtttagcttaggtgaatatgttgcagctattgcattttctaaaagaagcctctagcctgtgttgtcgcaggactaaactcacaccatgctattgcttctttttcttttctttctttttttttccatgtaattcttctagctctttatctcattaccgcccggcaaacagctgacacgaagaggcttcaaagcttgaggagcccctgtattctgtttgccttttgcttgaaactattggagtggtttctaacttagattaaaaagagagctcacaggcatgaatttgtctttctaccggcagcagaaaaccttgacttttattttatcctactcaatttcattccctaatctactttctcaaacatatccttattttagagatctatacctgtgccatatttgtagtcacaaaatttctgctcagggttttcactttgaatcaattgcttgactgatagcagtgccagtatcattattttatatagatgttattaatccatagagctctggattattatttcataatctatcaaaaatgccaaatattaattcacagtcagtttgctgcagatctgtagggggaaaaataagttttgtagttccaaataagaacatttccctatttttttctcaccttggtttcttgttttattttggtaacatcatccatgctatatgtacactgtagagttgatgctgagaaaaatgacagactgacttcttttcttgatgaactatacataatggcaacatggcaagattactttcccttggtcaagaggtttatttgttgcctatacccacgtggctctgtctgaattcttatttaccaattctagtaagaaacagtgtatactttgattgggttttttagtgatatactctgtatattttgattggnttttttagtgatatactttgtatactttgattggtgtataatttggatacttcgattggtgtatactttgtaaaaattggatacctttgattggtgtataccttgtatacttcagtatatacttagattggtatatactttgtatactttgattggttttgaggaactattttgccccttcctctggcccccaaatcattcacttgccagtaggtctgtgggcttaattgaagtcgtcatatgcaggtgcacaagtgtacagctctggctttaaggctggactgtttcgtatgctgttcctcctctccgtttctgccagaggaaattccatctcttgcctgccttcatgtggtgctgataaagtccttcctgtacattagaattcctgttttcctttaagcaacagcagggcattgggaatgatcaggaaaagggaggaggaacagaagaagaatatactcagccaagtagcatgagctataactcttggtttgccttgcatgtcctttgaaacaagtagttcttctaggaaaaagcactgctcagtgaatttcaagcttccatgaagctcaagtgaaactcctctctagcttactagatggacagtagttcacacatgtttcctttttttaaattatttctacaaattaaagcaaaaatcaataatttattaggtattgatacagtgattaatatcattacctttgttggttatatagtcaatcagttgataattttgagagtttgtataggttgttttagggcaatgcatttgaaagatgtcaagggctgtcccatacattgtggagcctgtaatttttttaatggagtcattgaattttgcagatgtgaatgttctgaagtattgagtgcccaagagcatcgggacctatttcttagtagaatgtaccctaattaagatagcgagagtaaaaatgacttttacatttttcataatttttttttactttagaaattaactttgtttaggtttaaatttgtatataataaaatttacccatttaaagtatacacttaaattagttttaaccaacatatacactgtgtaaccaccaccacgaaac

SEQ ID NO: 575 - DNA, 951 bp, Homo sapiens
ctggcctgctggtttctcatgaatgcaccagcggattccacctcaggactccgcacgtttccctccacagggacttccccagatgtgcccgtggctccttcttggcatctggtcttagttcccgtcttggctctgcagagagccctcctgggccctcctcttcctgcgtctctgatgctttactctcccttcatgtctgttcgtagcttttgatgctacctgaggttatcttattcctttgtttcctttttcatatttttgccactgttcacagcattcccccttgaccaccgttgcctcaggtggtgcatcaggcgcaagttccttcgaggcaggggcacctcttgtctcattcacagccattccctagtgcctagcacagggtcttaggccctggttcctgcacacagctcctcagacctcgggaatctgcagtaatatgagtgtcttatatgccaatgagaggactaggggctgggggccccaggctgcttcaggatggggactagttggccagaaagccaaggcaggactagagggttgggactttcagtcccaccctagcctccgagagggcagagggcctagagagaggtcaccggtggccagtgacttaatcagtcacacctacataatgaaaccttaataatgcctaaagacagggcttccaggggccaggcacagtggctcacgcctgtaatcccagctctttggggggccaaggcaggtggatcccgaggtcaggagtttgagaccagcctggctaatatggtgaaaccccgtctctactaaaaatacaaaaattagccaggcatggtggcgcatgcctgtagtcccagttactcaggaggctgaggcagaagaatcgcttgaacccaggaggcgaaggtacagtgagccgagatcgcgtcactgcagtctagcttgggtgacagagcaagactccatccc

SEQ ID NO: 576 - DNA, 703 bp, Homo sapiens
gcttctttggatgtttgttttagccactttagaatgatttaaatgataagctttctattttgtcatacaaatttattttcaaattggacttttaacaaaagcctccaggagtgttatgccaatcctccaactttaccctagttatctgataggccacacaatttctatcacatgtggcttagcagaaggtgagagtaatagcggtttagactgcggatagctgaaggctccacacaggctgaatgagataaaacctgtaatgtcctgtacactgtgactggtctaaaggaagtgttccatagatggttgtttttaatgttattatgtttacaattttttttggtccctaaagccttggaaaaaaatcctcctcattataaaatacatagtcacatatgcacatggcaaaagaaaaaaagccttatctggctcttgcttccacagggcttcatttgctgtaatttttagatagaggtggtgattgcaaaacatatgactaattgtggttgtcatttaattgttcactttaaaattattagttacattatgtaaatttcaccttaaagtgttttaaaacaaaaaattataaaacatacagattttcagccattctaatatttatcaattgtgtttttcttatctcaatatctgagcaatttttgaaaaatagtctgtcaacttaataaaaaaaggttctgctgcc

SEQ ID NO: 577 - DNA, 1288 bp, Homo sapiens
agaaaactatggctgaacttagtttttggataatctagttcatgtgcattaggctgccgtatatactactatgatatttagctgcagtatcaatgtggcataaatactgcggcagcattcttcgaaaaccgcattttcaaatttatccccgtaatcaatgtgggcctattaaaaaaccaaatcatgatacaagaaacaaccttggaaaagttatttccctttgtaatacctttaaaaatccagagtattatattcattttactgccactgtggaaacaggttctagatttcatactccatctaaagtcatttttcagttacatgtaagtattatttactgctattgggatctattcttcagatattcaaaaacattttttgctttaaaatgcatatctttaattgggtgttggtccaaaaataaaaaattttgctgtctgtttttctctaccccattttgtggtaattgggcaacttgagctctcccaattattgtaatataaggacagacataatagtattctgtacccatagtaataattgcatcaagcttagatgagaaatttttttcatatactggcctttaaatcattaatggacaattggctataaaggtaggtctgttaactttctttgtgtgttcctgatggaattcaccatagccttacagcttttctcagaaggtaacttgttataagagaaatggcatttgcatgttccagagtcagaacctgtacagtatataaagcataaacaccttgaatttgattttagttcaccacattcaaggatccaggatgccaaaaatatgtgtgaacatttgaaacatttttatttgccgctttttccctttgataaagttgaaagaatgtattgtaaattggcatacaatactgcctttaatagaaacccaaaatgctggggcacatttcacaaatcgacaacctgagaaattgctttgtgtcccactgttattaagcaaaaagtataatgttcttcacttgaactaatcaaatacaatagattataaattgtgtattgtaaataaaagttcactctgtgagtgcacattttggtaaattatttatttatgttagcatttaaaagtttaaaaaaaatgcatttgaccaggataaatgaggtatgttgatcatggctttgctttatatcttgatattaaagctggtttatcatcctggtattttaaaagctgctttggggttttttttttcttttttttttttttaatgtaaactaacctcctgcatgacagaggttagtttacatt

SEQ ID NO: 578 - DNA, 2234 bp, Homo sapiens
  misc_feature 2106: n = a,t,g, or c
gcttgtccccataacaaaactgaacgagccacaatggacagaaatagaaaccagaattccacagtgcaatttcacctcacaaccgattcgcaaaaccccagtaccaccttatcaatcaacagccactatctggacttcatgacatgttttttctttctgaatattttaacttagattttatgttactgtacctttccttctactttgtaacaattttcagtgttgttcattttgatgttttcgccatctatgccctgaaagacgtacaaaatgtcccttaccagagctgcttctgtaatttccatagtacctgcaaaatcattttttaaagacagtaattactagacaatatttaacagacaatagatattatggtgcaattagcttcagattagatatttgccaccccgaatgaaatttactaactcaataaataagctcaagatgaaaaagagtatgagattagaaaggaacagggcgagtctcagtctagaggttggcctgctgtgccatggacgcacagctgtcaaacacgacatgagtctgcagctgtggacagaggctggacgcgggagccacacacagggacaggcggagtggggcagatggtggagactactgcgggggctaatactgtgccaggatgtcctccagctctcagatgctcctcacctttgcattctacgcaaggacaggtacaggtaacatccagagccatttcgtaatcagcagattacgagccaacagggaaacccaatcctctgttttcaggacactcatgtttcaaatgctgctaactgtagtgttctcaataaagaaactcaagcttccttttggaatctagcagggctttaaaaccctccatgaggtattcatctcaccattcagtaattcctcaatgactctcttcgacgtgccaggcactgtgctgagcactggcaccataaatgaaaagacatagcccctctgtggccttaagactttggtagaagaaggtgacttttactgggggcctaacccagccttaaagactttcccagggaaacggcaggatgaaaacagacagggagaatgtgatgaggaacagcaaagacgagagatgtggagggaggaggccacatggaaaagcagccaaaaagcagactgtgctgggaggaaaaagcccaggtggcctggggtgaaaagccaaactccccaaggcgccgcagaccaccagggactctggacttcatcataagaacaagaagaaaccacttaaaggtttgaagtggggctcctggctgtctttaaaataaggagaggctgaattccaagtgttcacagaaaagctgtattaacatagatccttacttcaccacccgtatccccttctctcctggaccttgtcatgttgcgagacacagcactggggacaccttttgaggtagtggcttgtgaagaaggctgatttgcagttaaagtccatgcgagtcgtgaccccaactgctgtcgaaggcaatctcctactcgtggagcttgattagactgtcctggtaggagagattgtggcgcaggcgcgggtccattgagggcacacaggccaatgctgctgatgccactgctgcccacgctgccggagctctgggctgactgggcactccgatcttggtagctcaggggaagggtctgaggcctggcatagtagtaaggggttgagtgggcatctcttggtaaggcctgagcaaataacgtagcatagctagaaaccttgcttggctgcctgcgtgggtcctcactgaggctcagcaagaggtagagtattgaccatttatttttcaaaactccctgtgaatgaagttttctgtggagttctgaaaataatgcagcatctgcttctcttcgttgtcgaataagctctttcttgattttttcagctactaaagattcatctctttcaacagttggggcgaagttgctgccaatcacccgcacagcatactggaactgctgggctacatcagttcgcacctgcccaggttcctgcagcacaggttctgcagcagaacgttcggcgacttctggtccggggtcgccatcctcgcccggagccgtgcacggtggtccggnagagccgccactgccgccgcacgcgcagggaccgcggcccgcgcccttcctgcgccccgcaagctccctgctcctgacaggctaaggcgcgggcgccgccggccaccagggcgccattttaacggaac

SEQ ID NO: 579 - DNA, 1807 bp, Homo sapiens
gtcagagaagaaatttccttgtcagagatgttaaagggctacagtcccttagcaaagaaacttcgaaatctaagttggtttgtgtttttctaaatttgataccgtaattcatttggcagcaaaatctgacttgaactgatgtgagagtattgtactttatatttatgctacttcattgtgacttaattttccctgaagaaatatccatggatttgattataggttttcccttagatgctgtggaggtgttttgtaatattcaaaatatgcccatattgcctttttaaaaccccaaagattatgaattctgaaacacatccagcccagcgggttttggataaggggttgtaggcatttaagcagcctcacataatgggctgacttcatccaaaacatgaaaatattacaaggcaaattctattttttatattttttggttcaatgcttgaacaacttgtttttatgctgggggaagaaaaaaagaaccaaccctgagtgtgattgttacggaaactaatgactttgtttttaaaggatcacattgattcaacaccttctattggacccagaagtgcgtaaatattacctatggtagtaaacgtttaattatcattcagtttaaatgttggccttctgtatgtagccaagaacagctcattttgtgaatttcagtttttaagtggctgctttttgatttggttgtattattttattataatgtatttgcaagtatattaaaaaattaacattgagccataaaaatccccaaatatgttcaaggacttcataattgaaaaatatatagaaaacaatccttacttctttttacaaaaacaaaatcatgggaattattcttttctatatatttagttataaatctttctctgggccgggcgtggtggctcacgccagtaatcccagcactttgggaggctgagacaggcgaatcacgaggtcaggagttcgagaccagcctggccaacatggtgaaaccccgtctctactgaaaatacaaaaaattagctggacacggtggcaggcacctgtgtgtggcgggcgccagctactcaggaggctgaggcaggagaatcgcttgaacccaggaggcagaggttgcagtgagccaagattgcgccactgcactccagcctaggtgacagtgcgagactctgtctcaaaaaaaaaaaaaaagaaaaaaaatctttatctggatctgttaaaccatatattattgatcattgcaagtgaaattttgagagattgtttctagtatttaggtgatgaaaacatttggtaatattgctttggttcaaagaattttatgtctttatctttctagaagaaagcaattatatatatatttttgctaaattacataaacatttaattacatcaggttctaatttaaacatgtattactcacttgaggccacttttaaatattcatactctttgacataagatgctttgtatatttctcatttcttttagttcttagtaagtcagctttaaaaagtacctgccaaccagaaccttccatattctggactaaatcttgctcttcggattatacttcagtgcagtaactgtggatttgcaattttgaaggggagatagtagctattatattttacacttgcttgatgtgataactctaaagactttttaactgataaaagcgcacatggctattttgatacacaaagttgtgtttgctactttagaagcttttgtggcagaattgtaatctaattttcataccttgtatttctgaatcacaacaaaaaaataaatggggacaagctcc

SEQ ID NO: 580 - DNA, 1558 bp, Homo sapiens
  misc_feature 1462: n = a,t,g, or c
agggcactttggcagtactcatcaaaatatgcgatgtgcagatgcttagccagcaactccgcttctatgaatctagccaacagaaatacttgtagaaatgtgcagctataaatgtccacagaggctcagagcctcattgtttttaatagtgaacagttggaaaccaaatagatgtctgtcagtagggatttggcagaattgtggcatgtttttatgggtatggaaagtatggaggaacatagacccaactgttggtaagagttatctctggattccggaataggtaggggttgatgggtacagggtctctactttgcataattttgggggccactgttcacatagaacatttgcgatggagtggtgctcctcgattcgtttaatggagagggtttggatgtgcttttgctttttatttaacacatgggtatattacttttctttttctgcaaagagcacttattaattttatagttttttaaattggctttgcccgcttcagtagtcacaggtagctacctgaccgagaagccgacttgggaattactgttactcgtgggtgatactgtcataaaggggttgaaagtacttgttagctgtatatgtcagaattgattaaagagaaccaactattcttgtgcaagggatggtattgtagttaattatgacatttggagaaactaatttctgtctgtcgacactatctctgttccatttagacttagagacttacatgggcaatgcttgactttttgcattcagcacagaaagttaagtaatccactgtggtaaaatattaactaaatttatatgacttcttgactgctgtaagtagagaatatttatcatataagcaccattttcctgaattttttgttactacatattttatcttactgtcactattgtgtaaaatctttgaaaggaaaatgaatactgtgtaatagttaaacccattcataggttgcaatagagtgtcagccaaatgtgtcatacatcaaatcttcagcagcttttgcataatccaggagaattgaataatagttgaagttaattttgccagtgaaatgtagggaaagaaaaatgtttgaaatttaaattattcagatagctaaattcttaatcctaaaatttaaaccccttaattctgtctgtagtgttatatcaagactttttgatagtcatgaaactgagaaaaacattaatcagataactaaaaaacagcttttcctgtggttaataacacctttattttgaacagagtactcttaagcaacaaatattgtgctgaaaaaagaaataatctgtgcaaaaaaattaccctgatgaaaaataagaaatgaaaactgtgaaaaaaaccaaaaataaatcacaaaagtcacctgcctcttttgtttccctggaaatttggccaaaaaaaatttaacggaaagttctgcaaatgaaaaatgggaaaatgganacatatattattttgactgtgtgtcccctgtcataaaagatggactatactagctgggtgtggttgctgatgcctataatcccaccaccacgaaac

SEQ ID NO: 581 - DNA, 1588 bp, Homo sapiens
ctttttattaaacaggcaatgcattgtgcagtggttaaagacacagatgcctagtggaaaagtttaaaaattatttttggaaacagtctatgaattgatgaaccctgccgtgttccttcatctccttctcagagtggctgtctttaggaaaacagattgttttatagctgctcttggaaacggcatccctgttttgccatgaatgtcatgcctcgtagtaaacatgaaagaagacaggatccacaggcaagagagcgaccagagacatgggctgatctcagctggaagcacagatgtcccttctcctagaagggcttctcttctggcctttgctgggtgtcctatttatgtgtccaatttcatttctattttcttccttgtctgaggcttctttatcaagggaattcgaaaagacacattcgtacctttgggcacaggaactggttcctggactttttcaatgttgttcttgtttctgggccctctggcccaggagtatggctgtgtgtttatcctctttgttttgcctggttccttcctcttccccaagttcgtcataacttgatgataaaatcaatctttaagtttcacagtttgtttgccacaatacactggcagtttttaactaagtggcttgtcagggtagtggacatgctttatcagcacactgcccacctattttataatctggggcatgtcactccaagcttgagatttctttctggcaagttccatccaggatggctgatctgtactggcataactggctctcttcagctgatgcagttccttctccatcatcactgcagactgagccaagttctgatgggacaatgagattcctctttgcagcccctccttgaagttgagctttgccccctgcttccggtccacagcgggcttcacaggggttatcaggaaagacttgctgcgaacaaagtcagcttgcttcacaggctcctggcctctctcgggcaccttggcttgctttcctggttcagacttcagggtccgtgccccaggcttgtcttcctggttgggtggctggtccaaggtccccctccgcttctgccgagtgacggtgatccagggtggcgcaggctgcccatcagctccaggccctgttgctgcaggcggcagactcttttcagctcccctgcgcagcggccttttctccgccgtcctgggctccttcctgggttcccgctctcccgggccggcgtcggggggcgcgggctggtgcgggagcgtgaagctctgcagaagcggcttccggggcaggggcggcttggagctgagcggctcggggggccgggccttcccctttccttggtcgctgggggccctggtgcctcgaagggcgggggccgtcccgaggggacacttctcctccttcgggagcacggtcagcgacctttctaaccggacctcggcactgtacctcttcacacccttcacctcctgagaggcgccatccctgtatttgagcgagagggaggtggaccggagcttgacggggaaggggtttctgtcctcactcggggccggctcctgggcggctgggcagggctctctcgtgccgggcgcg

SEQ ID NO: 582 - DNA, 2306 bp, Homo sapiens
  misc_feature 1512,2196,2197,2212,2229,2257,2262,2273,2274: n = a,t,g, or c
ctgaggcctgtggggggaaagagactctacttggtggagtgaagcctagagcatggatttttctgatctgtattgttactttttaatatttttaggcataaaattgttttttatcatctcaggcctaaaccacccacaaaaccttagccttgagggtcgggggaagtgtggtccgagctgcagctggcctctccacgcagagcccctcacactggcccctgctggagccatctggacgggggtctgccgaagcccggcttcctcccccatcagccttgaaggagagtggcgggtgtcctctgtggctgtggagttctcagccttgaaggagagcggcgggtgtcctctgtggctgtggagttctcagcagtctgcctttggccccagcccctggcagcttctcccagcatgagtgttgtattttccatactctcagggtgctgggtcattggtagtgtctggttcctcctgagaccagaggcaggacacagagctcagggctgtggcctgggggcatggctgggggagtcaccttcactgctgagggtggggggcatctcagtgtgcgtcctggggcccgcagcgctcccgccttggcaagccctggactgcagcctgtgagctcagagggagggtggtcccgtgagctagggtggggtgggggtgcggggagggtgctcccatgggttggctgagagtacattgctggctcagggggtcgggccgtgtgatccccgtggcagccagggcttaagctgtggacatggtgtggggtgcttctgggggttgggccctcctcacagttcctcgccctgtctgggtgggctggccacacaagagggtgaggctgaggcagcctcgcctgctcttcctcctcgcctctggcctcggtaccggggcgtctgctgaggaggaagaccgcttgtcctgctgggaccttgggcctctccgatgcatgttgactccagctgagaggtgttctccttgcctgtcctgcttttcatctggaaaatcaggtccaggactcttgctttgcaagatgagtggagaattgaagatttcagaagttcccaacatcaagcaggtgctcagggaatggcggcattgtttgcaggagtggggtctgtggtctctgtcactgggtcctgctcacttgacccccgagcctttctttcctcatttgtattagggtcagttccaccctcaatgggtttctttgaagggtatgtgcagcctgcctgggggaaggcagcggagtgctggccttcctctcagtgcttgcttggcccctgggcctggggttctcagagtgaggtgctgcaggcgatggcggtgtggccttgagagcgggggaggccccatctgctgcttcccctccggctgacttctcctaacaagccggaagtgtgcgtctggcattcatgcccccaatccccacctcttgatgtggttccttccgttttgtcagtaggatctgttttcaacctctgcatgctgaagtgctcatctctntaggccacttggtctggcgcccacctcgtcgtggttctcaggatgcctcatttcattaggctgagtggctctggactaagtgcacctgcagagctgaccgccccaccgccagcctgctgagcgctgccgcagccaggacggtggccagggagcacgtcccctggggcagcagatgcatccccttcctttctccttccctttggaccctgtatgcacccctgcattctctcaccctctttagcaagttaaaaaaaagctggcatttcctcccacccccatgaaaccctttgtaacagcagtctcaggtccgcagtgtcaggggctgcccagtggtggtgagagcgcagcgtgggtgcagccctggtgaagggcctgggactcacagctctgtgctctgatcatgggctggcccgcgctgtcagtacagaaacgccctgtgaacttcagctgccatcatggcctgtgtcgtgtggctggtgtcgtgtggccctcgcatagttatccgacatggcaccgtcggcacagaaacgctctgtgagcagcagctgccatcatggccggtatcgtgtcctcgtgtagttgccccatacgtccacctcctgcttggcttcccctctttggagcctccagggccagaggagcacagttcagaaactgctggtcaggagacctttcctggagganntttttggaaaaaaanaaagatgttgtaggtgngatgggacctgtttgtaagccccccccntgtgngaatccggtgnncatgggaacaggctccaaaaaagtgtgtatgt

SEQ ID NO: 583 - DNA, 1765 bp, Homo sapiens
  misc_feature 1374,1598,1617,1641,1652,1663,1760: n = a,t,g, or c
taaaatcatatatataagagactaaagcagcatttaaatgtggcatgttattaaaatataaacatacaatatatgaaataatagtattaagtatagttttaaaaagtatcctggttagtcttacaagtcaagtattagcagcttcattaaaggagcattctacagcttgctgtctgtcacgaatagttttcctatttgttgttacatgcttaaatttgataataagaatataataattgaggctggaaatagcagtaaccttccctaagggatcacatgttttattagctgtgggtaaaaaggattcatttgtggaccgtatctgtttcatcacagagtcctcacttagggtcatgcttttaaaactaaaatcagattttagttttaggaacattagactacctccaccagatcctgcacagtattctaccttgatcatactacacagagttggagcagacagctaggtgttgttcttgcctgccacgctattcaaaaatattttgctatgcctagtacatttctagcttctctgaataacacccaattttaagtgtgccacaaacttgccttatcctgttttggggggcccaggggagacagggtcttccatagctcaggcttggagtgcagtggtgccatcacggctcattgtagcctcagcctcctgattagctgggactatgggtgtgcaccaccatgcccggctaatttttcaaaaatttttttgtagaggcaggttttcactgttctgtcacgctgatcttgaagccctgggctcaagcaatcctcctgctttggcctcccaaagtgctgggattacaggcctaggccaccacattggcttgtctatcccgtctcttaaatgagtatatttctttcagatcagttgctctttgagacaaacctcttatgtttttacacttcagagatttttttcctttaaaaattgcttctttaaaactctgcattcatatttacaggtgcattctattcatatttacaggtgcattctattcatactttgtcttcaccattaccagtcatcgttttttgtttttgtggtttttttgaggcggagtcttgctctgtcgcccagttggagtgcagtggcataatcttgcctcattgcaacctccgcctcccgggtcaagcgattttcctgcctcagcctcccgagtagctgggactacaggcatatgccaccatgcctggctaatttttgtattttttcttagagatggggattcgccatgttgaccagactggtctcaaactcctgacctcaggtgatctgcctacctcagcctcccaaagtgctgggattacaggcgtgagccactgtgcccagcctctagtctttcattcttttantttttttttttgagacaagagtcttgctctgtcaccaggctggagtgcaatggcgtgatcttggctcactgcaacctgtgccttccgggtccaagcgattctcctgcctcagcttcctgagtagctgggattacaggcatgcgccgccatgcttggctaacttttttttactagtaattgttttgagatggagtctcgctgtgacacccaggatggagtgcccngactggagtgttgcccagnctggagtgtcgcccaggatggagngcagtggtgcnatatcagctcngtgcaagctatgcctcccgggttcacaccagtatcgtgcctcagcctcccaagtagctggaatttcaggcacccaccgcctcgatgcgaacaaaggnacaga

SEQ ID NO: 584 - DNA, 2084 bp, Homo sapiens
  misc_feature 746,851: n = a,t,g, or c
ctcgtttagctaccaattggagcagtttaacgtgcttgagtccccggcgtgatgtgttcatggacgaagttgccgatggatgttgtcaggtgttgcacctggagggcccagatggatcaatgaggcatttaaagtgtagaatctcaccctgaacccagactattcagataaagaactggtgacacgtggctgtacattcagcacagctgtggtgtccccaagtgccatgacccaggagccattcagagaggagctggcctatgaccggatgcccacgctggagcggggccggcaagaccccgccagctatgccccagacgcgaagccgagcgacctgcagctgtcgaagagactgcccccctgcttcagccacaagacgtgggtcttctctgtgctgatggggagctgcctcctggtgacctcggggttttcgctgtacctggggaacgtgttcccggctgagatggatacttgcgctgtgctgcaggctcttgcatcccctcggcaattgtgagctcaccgtctccaggaggaacgccaatgtgattcccaactttcagatattgtttgtttccacgtttgctgtgaccactacgtgtttaatttggtttggatgcaaactagtcctgaacccatcagcaataaacatcaacttcaacctcatcctgctgctcctgctggagctgctcatggcggccacggtgatcatcgctgcacggtccagcgaggaggactgcaagaaaaanaagggctccatgtctgacagcgccaacattctggacgagtgccatttcctgctcggggtcctgaaatcttactcagtcgtcaaggtaatcgcaggcatctctgcngtcctcggggggatcattgccctgaacgtggatgactcagtttcaggcccacacctctcagtgacgttcttttggatcctagtggcctgctttccaagtgccattgccagtcatgtggcagcagagtgtcccagcaagtgtctgggggaggtcctgattgccataagcagcctcacgtctccgctgctgttcacagcctctggatatctgtcattcagcatcatgagaatcgtggagatgtctaaggattacccgccagccataaaaccatccttcgatgtgctgctgctgctgctgctgctagtgctcctgctgcaggccggcctcaacacgggcaccgtcatccagtgcgtgcgcttcaaggtcagtgcaaggctgcatggtgcatcctgggacacccagagcggcccgcaggagcgcctggctggggaggtggccaggagccccctgaaggagttcgacaaggagaaagcctggagagccgtcgtggtgcaaatggcccagtgacccccagacgcggaaaccgggtggcagcgcccagcctggccccaagcatggaaatgcaaacccctaatcgccctgagctactgcttctaacacctcttttcccttgtgtgagggcaaaccaggctgcaggtggggttttcacttcctagggtagtttaattttaaaataggccaatgttggctagtctgtgcctcagtgagatcagtcagctccgagtggctcccgtgtcgtaacagcaggagcatggccgcaacttcccaggccgaggaagggcccccggctcggcctcttgagagccccacccctgaactggccccagctcctcttcctgcctctctcatggcttgggctggagtgggctctctggacctgaccagactgtgggtccctgcgtctcctgcccactctgaccgggcttcctccctccacgcttagggtctgtcccgggtactcagtcagcccagtgggatcttacccacttccctgcaaggtgcacctgccccaggctcaggctgcccagcggctcttcctggacagtgagagcagggctgggcgcctctgtcctggcccgggagccgcaggggcccctcctccagagcctgggcgcaagcgacacaggctgccgctgctctcccaggtgaaatccacaccagtccacgccgggtcgcctgccctgtctccctacttagacccagtcattctagagggatccaccaccacgaaac

SEQ ID NO: 585 - DNA, 2512 bp, Homo sapiens
ccttctaggaggacattcctcctgcctgcccccctccccgcaagaggtcttttcaggaataactgaaaaacccatggggtttgtggtcctgctgctctgccaagtccctcttgggcagctgggctgaggactggaacattctgtggcaagcaggaggcctcagcagagatcaccaagacccagcacacctggtacagacagcctgcggcaaaggcaggtgcagagtgcagacagccacggcatcctccttcctgcaggtcacccccacgagccacttaacctctcagagcctctgcttctcacctgtcaagtgtgtgaggtagggtaccagttagtcacggtacttgctgtctcacagaggagccgacaggtgagaacagtgtgcatgtgggtgtgaacactcagtgtggaaagcaggtgtgtgtgtattcaatcccccaatggtgtcaagggctcctcaaaatgccatgggtccccaggtcattgtgataaacactgtccccatcctgctgtggttgtggctggaaggtccctcaaggagtagactgtccctgagaacaagatggatgcagggtagtgacgagttcaagcatagctagagttactgttttttagcaactcaacctgattttttaagctgcctacttttactttttactgtgagcttctgtccatcaccatgtaatttgtaataataataatacaaaaagaaaaacgagagagagaagaggacaagatgtccacagaggaatctgcattcgaggctgtttgcagaactaccgcgtttgtaaggactgtttcccactgggaactgtgtgtaattaatgagcagttttatgctttccctctcgtctgtgtacggtgtgattgttgtgtgtttcagaatctctattcagaaccaatagctggtaatgcctgctggctcgctgccctcaagttagcctctgaacgtgccctgcacctagagaagcagccttctcacccgcctcacctggctgctccagcggccaggccagccacctgaccatgaccattgctgatgtgcaacaggccttaattgaaaaaacacacaagtacatacatgcacatgcgcgcacacacacaggtgatttcacaggtagatctggtccctcttgctgtctccaatgctctagaaagcagcaagtaggcagctgacagtgttcccagggtgagtggcatctcccctcatcatcagaaagattcagtcaaattttggcccagagctgaagaggaggacttgggaatgtcagggaaaacatgacagggctaggggttaacaggcttctttggccaggagatggtttccagttcaccgccaacccaaaagctctcttcaggtcatggcaaacagaccaaggctgtgggtgtggctgtgcttggcactgactcccccacaggcccgctgtccaggttggctcaggattccagctgccatccccaggcaggcccctccgctggctcggctgctttcacaatcaccatgtctgtctattagagactgtgccattcaaggagacggggtccccgggggtgcagacttgtaaaattttttaatttttcaacttggctgaactggtccccatcaacaggaaaagccttcggaagtgaatttacagatttctcccatgtttgaaattaacataacatgaacccagaaggcagagcttgcagtgagctgagatcgcaccagtgcactccagcctgggcaacagagtgagactctgtctaggtaggtaggtaagaaggaaggaaggaagaacagccctggatggagttattgggaacatgtcttatcaatgttgaagggccccctatcactgtagggagacatccacgtgggttgttttcgtctgctgtgaaaatctagggttggaatcatggaagcaaactgcaggaattcttaatcatcctgctcacgtggtgggcatcagagggtgtctgcttggcccccacagcactgggacagtcagagaggccatgagtggatgacgccctgatcactgccctttgcagtccaggaatacctcactgggctggggccataccctgtgccctctggaagacaagcctgcgcacttactatgtgccagatgccatgcacagtgccctagttccttgctgtagcaccaacacgtcccacgctggtgcttaaatgcacgcaaacaactttggtggttgtggcccgaaaagctcaaatgttaaagttaagcagtcaggcaagctagaagaggtgaggagcctcctagaaaactcattcgatgacacgcgcttccctcacctattcagatacttgccgagtgcctgccacttgcctggccctgtacccagggcccatctgggagccattcctgctatagctgggaccacttgtgaaacggctagttgtgcctaacagacatgctcagattcacaaaatgaattcagaacacttacctgtcccacccgtgaaagtgaccttggaggtgtcattgccccccaccaccaccgaaac

SEQ ID NO: 586 - DNA, 1985 bp, Homo sapiens
ggaatggaaaaaagaaattttttgaattcaaaactgttgattctttatttaaaatctttaactctgttagtacatactaggtggtgttgattttttttgagactgttattcttcttgagacattacatatacttagcgtgtctgaaatttcaatgtctgaagcatttccaatgatttatgtatctgattgttgttatctgccagctttcactcatccttttgcctttccttacttgtttggtaatttttactgtgaattgcttatttccctgagaactttgtgtgagtattgcttgtttttcctggaatttttaggaattctttgacacctgggagaaggtggtttttaccagatatttgattatttcatgcctctagtgaaactacctgtgtgagaccatcttatattctcagggtgaggtttttcttttcagaccattttatgtaaattaaggctttaaaactctatgagagtcagcttgtcattatgcattatcagaagagattttttttttctgccggcaatactatttgagatgagaaattttcattgcaatttacttgagggagagggtagtttatttttagttcatctagcactgaatgtgtagtaggtcttttgtgtatagctctgttgggatcttctactagatgtcttacctggggtgggggccatgtgctatgctcttgatccctggatttgtgaagacttgaagccaaagctgaagttctaactagtttgggaaatattcataagaggaaacaaaaactaaattttttttcttctctttgctttatttttgacctgagtattgcttactttctgtctagctcatggatgtagattagaataatattttaaacttcattctgtttagtttttaaatcgttttcagtggaagtatcagtcttagtacctaatctcccatggcataaggctgggaatagccatgatcctgccaaacacggacactctgcaactggaacaaatattctactctaaaatcaagtaattatgtctttttcaataaaatataaagtataatcataatgtaattacttctttcattccagtcttcactcatgctttcaaacatagattatattattccaacccttcttaagtggaattagtatttcattattccataaggttctacaaatacctacaaagaccatcatgaattccaggtgctctgtaacctgatcaggttggagaactgctgatgcaaccaaatttaatcacttaatgttcttactaagcactcatttgtttttctgcttctatgacttgctctcactgcttgctatcccaaacactgtccgtttgtacatgttccaatgtcaccattcctttttcgggcaaatgcttcaaaagctactgtttctataaaactttcctttacccttctcttttgacttgttatgagctccttttgtagtttgtaatctccttaagagcaaatttcacaaatgttatatttgtaatatcttatgtagcagagtattctcacagtctagaacagatggttcttctgtatctgttgaaagaaatgggaagatagcaaagcaacataataggataattttatttttgcctactagactatctcaggatgtatgtgttttaaatcctaaaactggttagtggtatttcagttgaaaaggtcttgaccctttcccttctaacataacaatcctcatcataagtgagagagaagattgggtgagtagggctcagtgggggaagctggttcctttcacccaccttcagaaatccaggtatggaatacaggggttgttctggacctcaaaattacctttttttttttttttttttgacggagtctcactctgtcgcccaggctggagtacaatggtatgatcttggctcactgcaacctatgcctcctgggttcaggggattctcctgcctcagcctcccgagtagtggggattacagggatgtgccaccaccacgaaac

SEQ ID NO: 587 - DNA, 2606 bp, Homo sapiens
ccctcagccaacaagccgaagccccccactatgctggacatcccctcagagccatgtagtctcaccatccatacgattcagttgattcagcacaaccgacgtcttcgcaaccttattgccacagctcaggcccagaatcagcagcagacagaaggtgtaaaaactgaagagagtgaacctcttccctcgtgccctgggtcacctcctctccctgatgacctcctgcctttagattgtaagaatcccaatgcaccattccagatccggcacagtgacccagagagtgacttttatcgtgggaaaggggaacctgtgactgaactcagctggcactcctgtcggcagctcctctaccaggcagtggccacaatcctggcccacgcgggctttgactgtgctaatgagagtgtcctggagaccctaactgatgtggcacatgagtattgccttaagtttaccaagttgctgcgttttgctgtggaccgggaggcccggctgggacagactccttttcctgatgtgatggagcaggtattccatgaagtgggtattggcagtgtgctctccctccagaagttctggcagcaccgcatcaaggactatcacagttacatgctacagattagtaagcaactctctgaagaatatgaaaggattgtcaatcctgagaaggccacagaggacgctaaacctgtgaagatcaaggaggaacctgtgagcgacatcacttttcctgtcagtgaggagctggaggctgaccttgcttctggagaccagtcactgcctatgggagtgcttggggctcagagcgaacgcttcccatctaacctggaggttgaagcttcaccacaggcttcaagtgcagaggtaaatgcttctcctctctggaatctggcccatgtgaaaatggagcctcaagaaagtgaagaaggcaatgtctctgggcatggtgtgctgggcagtgatgtcttcgaggagcctatgtcaggcatgagtgaagctgggattcctcagagccctgatgactcagatagcagctatggttcccactccactgacagcctcatggggtcctcccctgttttcaaccagcgctgcaagaagaggatgaggaaaatatacaaggaaaagagggagatgttttgtccagacctactagacccaacagaaaaggtttttgtattagaatctgtttccttaaaaattgatttgactcctgttcttaaacacaagtggtttttcctaattccagaggaactggacgtcaccaaacaaggttgcattttacttttgcatccagtttttatagttttccacaaccaagccacccttcacagataaaatatgatgctggcatggcaatcagaccaaagcactgtccccaattgttgtcttaactatgactagacatgttatacagccatttatcttgtacaactgagaagaatcatactttgacctaccttgtagagatgtgaggatttagatgtttgctaacttcaaaactgtgcttgaatagactaataatatatgctcatatcagatgtcagttttcatttaacttgattcatttttggctcaggtcatttgggaacccattactaatacctaacaggaaatagctaatcacaacacacgttatctattagtcaccttcttaaaactgtttctgctacttctgaagtgtcttatttataagatcagaggtctgacaccttttttgcttagacagctctctatctcatccatttattttcttctctagacttactccatctctcctcatccttttgcctttgttatttctgctcggactcacatactttcaccatatacatattttcaattgtttctttccttttctcctttgtgagcaaagcaaacaagtactgtccaaggacagccttgtgcatatttcatctgttgcatgtgcttggtcatcagaggacagcagtccattaagcacactttgctgcttctactgtaaaggcagcctttaaaacatagcaatatgcgcctgtctcctttacatcatgtcctgaacaacatcactgtggttactcatccatcagactctctgtatatataagtactgaatcagtatttattaagtaaatgatgtagcactgtagtgattaggaatcattagcaaatgtgttgcttcatgccttggtgatggatgccagcatgttaaactgctgaagtttgattttctgatgcaaaatatatcttgtaaaattagaccactcctttaatgcagaccaaaataaggcacagctttaattcattattgaatgccttaaatgtcccaggtattgagaataaatgaatatgatacaaatgaggttatagtttaacatataattttaaatttgccaattgtaactctttagcacatttctctaaaccctttctgtcacagtctttttttaaatttatttatttatttatttatttttgagatggagtcttgctctgtcacccaggctggagtgcaatggtgcaatttcgactcactgcaacctctgcctcccaggttcaagcgattctcctgcctcagccacctgagtagctgggattacacgcatatgccaccaccacgaaac

SEQ ID NO: 588 - DNA, 1951 bp, Homo sapiens
  misc_feature 1929: n = a,t,g, or c
atcatactattttaaggccaaaaaggtagaaactctaagaagtcaagtaactttcccttaggtcagacagcaagaaagaggctgggattcagacccaggtgtgtctggctgccaagcccacgttctttgcattgccgggtgggtcttgggtttcagggaaggcttcataagggaggcaggagttgagatgggcctggagagatggagagggtcagccaaggtagagacacattcgtaaggaatggctctggtggcggcaagggtgtgctcctgcaggaattccaaagtggactgcaacgcggcgggggccctgcgcttcagcctgccctcagtcctgctcctcagcctcttcagcttagcttgtctgtgagaactcctgacgtctgaagcttgactcccaagtttcccatagcaacaggaaaaaaaaaaatctatccaaatctgaagattgcggtttacagctatcgaacttcacaactaggcctcaattgttccggttttttattttctttacaatttcacttagtctgtacttcatcattttgacagcaccttcctccctcctttaattaatggaatcttctgaattttccctgaatgtttaaagatcatgacatatgacttgatcttctgggagcaggaacaatgactactttttctggggtgttaacatgtcgcgagccagtgctccaggcacccagctttgtctgtgggttagtattggtgtatgtatgagtatctgtatgtatatatacacggtatttatagagagagactatcctggagaagcctcgttttgatgccattcttccctgcaaggttaagcaaggtgggtggaaactaagacacctgaaccctccagggcctcccgcatcaaggtcagcatgaggacagaccacagagctgtcacttttgctccgaagctacttctccactgtcccgttcagtctgaatgctgccacaaccagccaggcaggtccacagagagggagagcagagaaagaagtcctttctctttattgagttcgaggactacaaccaatttacactgccatctgatgccgtgatcctgagccaaggaggtgaggagcagagcacgcaatttcaccaccaaatgccaagaaaagggctgacattttctttcatgggcaccaacctgcatttgtatgtgtcccgaatccacagtcgtactgattctaatggggacacagatcatggtagagaatctctccctcctcagtaaatgtacaactgcacctgtcatcatggaggtcatacatgcatacaaagaggtgtacaggtaccatcttgtatacacatatatacccacatgtacagacatacatttatgcacattcacgctgtttggttcatatatacaggcataaaatagagtaaatacaggtagttttaaaagtacccttttgtgtgaattgactaccgttgtttgcaaacccgaaaataaaagacgttcattatgtatgaaaagtaactgatttgtattctgtgagcatgtaaaagcggaaagttagtgcttgttctaagattaccttcttgttgataaaccataaatgaatcatcaaagctcacaccaaatttttctatcaaataaaactagtgacagcttgtggctttttattagagctcgccacgaactagggtaaggtgagtgtcttagcatattttaatgcagttgcttactaaaggttttaaccgcacatgcacacacacacgctttcttatgcaatctatgtttgcacttgtgctttcagttagccttctgtaggaagtagaagtcatatgttgtctttgttgtagtgaaattatacagatagagttccatatattgtatttgtttcaatggtaaatccttttggaacatatagaatgcagagatttttttttccattaaaataaatgagtatgatnatccctaacacaataacgaagt

SEQ ID NO: 589 - DNA, 2625 bp, Homo sapiens
gggctgtagggcatcagactagtcctaggatttctgagacatatggctagggaacctctgcccaaagaatcagatatactctgtcatatctcttgtcaaagttggcatgaggggagatgctgtgtacatttctcagtcttgcgattattgacaccatggagtagataattctttgtttggggcattttcctgtgtgctgtggaatgcgtagcagtattcctggcctctgcctgctagctgccagtagcaccccacagttgtgataaccacagatgttttgacattgttgggtgtccctggttggctcaggggacacataatctctcctctccccacttacccagttgaaaaccactcttccacatgagacttgcttttttaaaaatgtgttttcatatgatttaggtaagtcaatgccagaaatataattttttccttcaataaacaactatttattgagtacttgttatgtgtcaggcactattctaggcactggagacacagcaatgatgaaggcccatgctttcttgatactacatttcagtagggagaaattaacaataaatctcaaaatatatactatttcagaagtgtggaggtttgtcatagagtcttctctgataaggtgacatttgaacaaagccttgaaggaagtgagtgaatgagccacaggagaagcagcaccaagagcaagaagcgaagccatcagaggtcctgcacctgacctcacctttccgcctgcaggtctgaccaagctcctttgtgtttcagagggtcctccgcggaagggcagctgaatggactccagagcagccttaaccctgcagcctttgtgcccatcaccagctctacaggttagtgggcaccagctcttctgcaactggatagatgacagggaaggtgttgggcttggcacattctctcttctgcctccaaagagagccccagttcaaagaatgaaacatctagcctctcaaaacattggcaaatgggcatttttgttgtattcttctttaaaatagtcttggcagcctaaaataggcattttctggaactagcttggggtaaatgaaacctcgccatcttataaaatgctgtcagatttgcagcatttaatacagatgtcccatattgactggtatttcactgtctatgttgtatttccgcatgttgtatctctcacttaattctcacacagccctgtgagtttgatcttatccccttcacatgaggaaacaggctcagaaagttgagggcttgttgaaagtttatgcgtggatgcagagctggagctctggtctttgatctacgtgttgtgctaatgccatggtctgtggacaggttgttactgacagcctgaagcctctcagtgtaggtgcatacagataagttaggcagtgttggtccagagatagtttctatgaataataattaataaaaatgaactattaagtcagaaaattgaacaaatatttattattgagtacctactctagagaaaataacatgctgggcactgagatacacaccgggtgaacaagacagtctgctcttagggaactttaaaggagatagaaaagtcagcagggaatgtgctgcaaagtgggtattattgcatgcctgagacacatagaataacaacagactacattgactgaggatttgctatgtgtcaggcacagttctgaatgctttatgtgtaataactcacttgttcactgaacaggcacataatgtaggaactatattccccatttatggctgaagaaataaaggcacaggcagattatcaaacttgtctgaagtctcacaactagtaagcagtggggcatatttgaacctaagcagtcgagcccagatctctagggactgggaacggcttcctagaggaaaaacatcgaagctgacactggagtgtggacgagtcagccaggagaggaaaggcacaggtggaaggagttctaggaagagggaacagtgcaagcaaagaccggggggaagtgaaaacgtgctgtgttccacaggcttccatggatcagtgtggctggggactggggcatgagcagggagtggaaggggaaaaggttgtgaggtagtagggccattttatgagccatgtagggaacttggtcattgccctgacagcaataaggagccatcgatgagttttaagcaggagggggctgggtggctaggggtcagggattgacataatacaccttaaaatgattacaagatctctgagaagctcaagccaggtacagtggctcatgcctataatccaatgctttggaaagacgaggcaggaggatctcttgagaccagctgggcacaaagtgagaccctatctctacaaaaaaaaaaagtttttaattagccaggtgtggtgtgacatgccgctagtcctagctactcaagagcttgaggtgggaggatcacttgagcccaggaattcaaggtgcagtgagttgtgatcctgccactgtactctggcctgggtgacagggcaagaccctacctctaatttaaaaaaaaaaaaaaaagccagttacttgactacatcctggggataattatatgatctcataaggcttatagtaaggattaaatgaagtatttataggg

SEQ ID NO: 590 - DNA, 1804 bp, Homo sapiens
gtggtggtggggaagggtccagacatctccattatcattaaaaaataaaaagtgagtggggaaaaaaatccaaaaactaccccattgaaatggccccagtaggggatttgtccctcccctctggagacagacacccctagggcaggggcactgagaggcagggggtccaaattagaccagcagcggaccccgccacgggggttaatgctacacggagttgtcgccccctgcccaggggattcacagctcagcaccccctcccatcctcgctgcaggaggggcccccagacagtcccaaatccacatccctcaggttgggccgggaaggagggctcggaggggggaactccccagcacccagccattctctcccctttttcaagagttccccaaccactattggctcagtcagaaaattaatagtctataaataccccaaactcaggcaggaggtcagaaaacacgggagtgggggcggaggaaacagcacagtccgccggctggggcggggcggagggcaggctgggggggtagttcccctctcccttcccgacaggaaagggtgccatgcccctgcacccaaaccccatggggacctcagccccagcctctgctaaaacagctttgctctccttgttaaagaaatgaaggaaaatgcaaaaaaaagatcaagaaaagaggataggagtggaagagaaacagtcccctcgttggcttctgtgacctgttggcttgctgtagcccagtgggcgctgctggcctggggtggagaccccgaagtctgcactggggggtggggtgggttctgcgcactgcggcccctcccctcatctgtaaagtgcataatgacatatcgacatttttgacttaaaacctgaatagggtcgggggggaaaggaggcggcggaagggatggggcgcgtttctccgtctccttcactctccgccatccagagagactgctacatattggagctggggaaggttggcagggaggaccgacctggcgcagaggtgaaaggagacagacggaggaggaggaggaggaggaagaggagggcaggagtgaagggtgaaggaggtaggaagcaaagcccatgaagagtccaggaaaccacggtcagaactttttaaaaaaagaaaaaaataataaaaaagaagaaaagaaaaaaagacttctggctgggggagtggccgcctgccctccagggctgggccacgttctctccggggctctcggagtccccgccgcctgggctggggtgcgaggggcgagggtggcccatccgaagatcctaagccaccacgaactctgacttgatgtcagggttgacttctggcttccacacggagtcctcgaagtcgaggcccaagccggaggcctcgctggggctgccgccgcccccgctgctactgctgtcgctgcggccggccttgcggctgggtgaccagtggtacggaccccgcgcgtcccgccgggcctttctacggagccgtttctgctgcagaagcagctgcagccgttccaccttgcagcgcgtggcgcggttttctgtctgccgaagccggtcccccgggggcttgcacatgcggatctggctctggccctgcagcagggaggctgagggggcagccgtgagcttctcgcaggaggtagttctgggggccaggtcgggggccggtgaggccggggagcactgggcgtggcagcggagctgggccagcgaagggggcatgccctggtagtgccgggtggcgctcaggaggtcgttcaggatctgcagaatggtgccgatgtcacgcc

SEQ ID NO: 591 - DNA, 1539 bp, Homo sapiens
gacctcggagcgccccgaccacccctgagcccctctggcttcggagccccccagcaccccttcccgggtcccctcgcccaccctaatccactctccctccctttcccggattccctcgctcaccccatcctctctcccgccccttcctggattccctcacccgtctcgatcccctctccgccctttgccagagacccagagcccctgaccccccgcgccctccccggagccccccgcgcgtgccgcggccatggcggccgtgcgcggggcgcccctgctcagctgcctcctggcgttgctggccctgtgccctggagggcgcccgcagacggtgctgaccgacgacgagatcgaaggaagttcctcgagggcttcctgtcagaagctagaacctgaagccccgggaggacgacgtggagccccgccgcttccgagcccaccccgcgggtccgaaaagcccatgcggggggcaagccagggaagcggccagggacggtcgcagaagtgcctccggaaaagaccaaagacaaagggaagaaaggcaagaaagacaaaggccccaaggtgcccaaagagtccttggaggggtcccccaagccgcccaagaaggggaaggagaagccacccaaggccaccaagaagcccaaggagaagccacctaaggccaccaagaagcccaaggagaagccacccaaggccaccaagaagcccaaagagaagccacccaaggccaccaagaagccccgtcagggaagaggccccccattctggctccctcagaaaccctggagtggccactgcccccaccccccagccctggccccgaggagctacccccaggagggaggggcgcccctctcaaataactggcagaatccagaagaggagacccatgtggaggcacgggagcaccagcctgagccggaggaggagaccgagcaacccacactggactacaatgaccagatcgagagggaggactatgaggactgtgagtagggtcctgccagccccacctgggtcggacccctggcctgggggatgtgccaatgggcccatcccagccttgggccccactctgagccagcctccccctcagttgagtacattcggcgccagaagcaacccaggccacccccaagcagaaggaggaggcccgagcgggtctggccagagccccctgaggagaaggccccggccccagccccggaggagaggattggtaggatggggggcaggagaggaggtgccatggccacgggcgatctggccccctcctaacctctcagctccccagagcctcctgtgaagcctctgctgcccccgctgccccctgactatggtgatggttacgtgatccccaactacgatgacagtgagtacccagcaccccagagtctgagggacataggcaggtgggggtcggggctggggtgtggtcaggagccagctggggcaactcacccaccttgcaaccccacctgtgcccgtggttacctcgctgtccctgctgtccctgcgtgcccaccaccacgaaac

SEQ ID NO: 592 - DNA, 1875 bp, Homo sapiens
  misc_feature 1545,1646: n = a,t,g, or c
gtggtggctgctcaccctccggagtttccacatcatttatctcatataataatcgaacttcaagcatcggaatgacttctgtgattacttcctgcttgctgaatctataaataatgacatgagctgaaactccagcgatgcacagcattctactttctggacaccaggagatgatctgaatggcatatggatcttcatctacaatgtctgtgtttggcctgtcatctttatttcttgacttttcaaatactttagatgtctttagcttatataatacttgtagagttattgcagaagtatcccagaacttaactgacccatcagcatgccctgtaataattatttctgggtaactttgagcacccaagccccaattacctccgttgatgggccattcctttttgctgtaaccttgacgtttctgtctagctccaacagaataaagtgcaggaataaggtccacaggacaatccgcaaaatattcgcaacatgtaacaggggactcatgtatactcaaagggtagggattttcaaatataggatatccattttgtgcaaggtctataagtactaaatccttttctagaagaacaaccacagcatatggttcttgaaaatcatttgggtatggtgtttcacacagcgttagaaaatcaacaattgaatagtccatttctagcacagcagtgcttttcccatgcatcactgttaagcaaggtcttcttcctacagtatcatatgacaaacctcctgataaaataataaaaggctccccagatctagtcgttttgaattccaccttgaggataggtttgcatggttctggcttcttcccatcctttaactgttttccatgtggagtgattgtctgtactggtttagcaggggaccttacattccatatagtcaaggtgccatctgaatgactgcaaataaattgttttccttcatgatgccaagcaacagagtggatagcctcatcatatgtgtatctgtagtcggctttctttgatttgaggtcccataaaactactgttccagattcaaagccaatcaaaagctttccctcgtccattggattatcacttatatggaccacaggtcctgggtgagatttagatgacagttcaatggctttattccacataatgacgtagcctgagagtgtgaaggactccacattgacaatatgtatattacctcgttcagtgcccacatagagccacttactctggaaaggcagatggcaaaatgtaaccctttctctgcaaaatttaagcgaatgtagtatggcaggcctcttctgacgtaaattccataagtgtaaggtgtcatcagccaaggcactcacaagcgctccctcattaatcaggaactggagctggattactgcagctccactgtcatgctggcaataacattctactcctggacgaccaaagagccttaaagcaccagtctgagttcccactgccaggatcttctgtacaggatcaaaggccagggctgagggttgatagggaaatccatggcgaacagtcttgnagagctgaaagtgctcggactggagcgtttcctggatctccggctcccggttcccaggcggatgctgctgctgttgctgctgcgacgccgaggacgagccngcggtcgggccgtccagcaccttcctgatgttgaatttcctcatggtctcggaggggctcccccgcagcccgggaggggaggcacagggggtccccgggcgggggagaccacccggggccgaaggcagcttcgaccgcggaaacggaggagtgggagtgtgagggtaaggaggcagctggggggaagcaaaagataatccgaacaggaaatactgcgacgacaagagcg

SEQ ID NO: 593 - DNA, 1838 bp, Homo sapiens
tttttttttagccttgccgccacccccacataaatactaacttcacaggaaaccaagagactacagagtacaattaccccataaaagaagacaattttagcttatctccctgactcttcccaccccaacttcctcaaaaacacataacagaaaagtctgtgttgagtttagcaaggacaataattaaagaaggtaaagtgaaggctcacagaatgcctcccagtttaagttaaaattccaacatcataacatcagggtgtcaattcattcaacttttaacccatttgagaaggtttaagttattaacttaaaaatatggcagtatttcttttgtaactataatctctttatagcctcttaattgctcatgctaatagctttattacatactactgcttcttataagaagtaaatccaggggccattccattttatcttagacataatatttactagttttccaagcacgacagaaatgaaaaaatatatatattagaacaagaacaatttatgttaatctctacaatctgtgttccttctgcgagcagtgcctgattctactaaaattaacacatttaagttcagtcttatgcttaagaaaaaaaaatctaatgagggactaatttataaagtatacacaaatataattctttaataaatctttccagtgttcactatatctgcattacatgtaatgtttccatccacagaaactcaggatagttcttgtaaaatgaaacagaacattctgtgttcatctctggcaagcaatgaacaaatagaacttgctcacaaaggatctaaaagtgctgcctcaggaacataaactacgtgctatatgaatgagtcttggttaactggctactatctgggatctcttcctctgctcataccactgaacccatctcttataaagcctatgagaaaatgaaagctattgcagaagtgaaattcaacatgagccacccaaattcttctaaggtaaccattctaaagcaaaatcagcagaagtcatctcttctataataacaaacaaaaaacccaaaaggcaaatgctactgctcaatcatcagatgaactcacagaggcaaaaatatgtgacaacagcaataattcaagtaaagtatgtatgaaaatttaaacacgccatgttcaagttaagacagaagtgaaggggagctatgatctttatattagtcaaaaaagctaggcataatcaccaaatgttaattcactttacagtcatcaatgagactattgtatatatttttgcaccttgcgcttgtaaaagcagataaaatatttaatatgtaatttacaatgtattttaccagctcagcatacaggatgtatacagattatatcaaagtagtagacagttacgggcctgtgcaaaccctgcaaaaatagtacttcagatatctgctaattaaaaacaaaaacagtttgctgtttagaagtgatacaatttcaactaccacaaaatacaaagggctgcaaaaatgtaaccattccaacaacatatataagttattaaataaagatttgatttgaaagaatataaatgaagactttaagtaggtcttttctacatgcatattattcctcattaaagaaaaaatatgtaaaaaggccattggtaattgctttgttaacatttgtaggccgggcacggtgctcacgcctgtaatcccagcactttgggaggccgaggcgggcggatcacaaggtcaggagatcgagaccatcctggctaacctggtgaaaccccgtctctactaaaaatacaaaaaattagccgggcgtcgtggtgggcgcctatagtcccagctactcgg

SEQ ID NO: 594 - DNA, 2061 bp, Homo sapiens
ggaagttatacttctttctcaataggttttatataggacttctctgccactcaggggagaatattctagcttcaaatcccaatgaattatctgcttgaacacttcactaatagagtttatcatatccttacccttttcatagttctgaatccattcagttccttttttcctctgaagacctgcctcctggaatgctatatccactgggtctagtctgccctggttactctctagggtcattccaaagctgtcattgtgagacttactttcactgttccatggacatcaccctgttacttggatcttatgttttctttatggcttacatccttaagttaacttcctaaggaagggtacacaggagataaaatgaatgagatcttgcaaaccacaaagatctttattctactttcacacttaattgatcaagtcatttggctggacatatatttcttggttgaagatcatttttttcagaactttgaaagcataaattcactgtcttctagcacttagttttgctgataagaaatctgatatcagactaattctaattcatttgttgattactttgctttttttaatctctggaagtttttaagatcttttctttacctttgttttcaactgaacaactttatttacttatttactattttctcttatacagattctccttaacttagtggagttatgtcctaataaacccactttaagttgaaaatgtcgtaagtcaaaaaggcatttaatacacctaagtcaaaaaggcatttaatacacctaacctaccaaacatcatagtttggcttagcctatcttaaaggtgctcagaacacttacattagcctacagttgggcaacaccatataatacaaagcttattttataaaaaagtattgaatatctcatgttttttttttgaatactgtgctaaaagtgaaaaccagaatggttatatgggtacttgagggatgatttctactgaatgtatatcactttcacagcatggcaaagtaaaaaaattaagttgacctattgaaagtcaggggatgtctgtatttattttttgctaatcatctcccctctatgtactttctcaatatttattagtcaatattgatcattctggatatatcctctgtgtttctttagtctatattttctgtttctttgtccttactgttctatgtcttgggagacttccctggttttgtcttgtaagacttctcttaaattatatgttttaatctaagatcattttcttattcacctatgttttttcataatatatttttcctgtttgcagagtcaacatttttgggaatgtctctgagaatattattttgagggtttcaaaagcactcttaaatcctctggattattagcgcttgtggtggagccatttttctactagtttatatctttctctttcatattgctggctttagtcaaacatttagtgatttgggtgggctgtccatctggaagaatgaaactgactgggggctctgggtacgggagatgtttcttgaccggcatcctctgccttttgcttcatgactagggcactgatcattaagcctgagaatccctaattactaggatgaggagggctttaattagcacattaacgtactgtcttatttttttctagtatgatcagagaagatagcccacatttttttcgttcagtgttaagtgcctggttttaggcagtcttacttccaggggtgggaaagggctagtatgtgtgctttctattccataaaccaggggtcagcaaatttttttctgtgaaagccagatagtaaaaattttggcattgcaaactacatatagtttctggcacaaattctcattttataaacaatgctttaaaaccacaaaaactgcaaaaataggtgttgggatatagtataccagtctctgcaaaacagacttgcatcagtccctccctcttcagcctcatgtttcactgtcaacttctgagtctcaatcctatctagatggggattccataaaatagattgaaccctcctctttcacccaccaccacgaaac

SEQ ID NO: 595 - DNA, 1429 bp, Homo sapiens
gaaaacatgacagatggtgaggtaaagtcaaaggcatgggtagaagaggaccaggggggcaagagcaacaacgtcataatggagaagtcagactttggtcaagaaagtccttcccttggtaacactaggaaaatctttccatttcagcatgtttaaggaaaatagcccacaatgtctgccctgatcaatatgtatccatgggactttgaagatcctaagccaggtaaaccaggagacacagaagacgtaccagatttgcaaagaaagaaaaggtataagacatatataactgaaattctaagtagctgaccgagaagaacttactttacctatttaaccttgatagcactgctaacttaatgcatcccaaaaatatcttttatattaatgattgctctcattttcttataaatgtatgtttcagtatatcgttgtgtctcatattcaagcattccagattgtataatttttgcaaataactttggtattatgtgacacaacacatttatgcaatctgcagctattcaattgttattgcaccttacagaatacctgctatctatcaactttagttgattcttgaagtacagtaagctttctctggcttgggaagccataactgttactataaaaacttttagttttggctgtggtttatatattgtgactttgaatttgactctaatatttcacatcatggtttgttatactgtcttaatcagggttttttatacaagttgagttacttgttttgcacttcttgttaggactcagaagctttattaatattggagatcaagtggtcctacttagtcatatgtctcaataagttaaggacaacttatccgttgtttattcaaagtcagagatagataacgccttcattccaattaattgtcccttttaactctttcagtatttcctacttagcagcatttccaaaggaagaagctaagagtgagaaaaatataccgtgcattattattactattggaaagggaagactctagggatgacataagaattatagcagtactataaacccaggaagtttgcctttcaaaaaaaaacacaggtagctcctgatagcactttcaagggattatttttttaaagagaaaaattatggtagcatcaagatcattgtatggatatatttttattatgtgtactgaaaatacagtattttaaaataccttaaagtatttattctcataaactcttattcattgcttcagctacaggtagaacttgctgggctcaaatcccaaagaggttttataaccttatttattcaaaacctataaggtggtatggaatcttcattctcccaagcactggaaaatgtctaagtcctgcaaattgccattgtgagccacttgctcgacatgtaacatgtaaggtccatttgcaaagcaaagcagccccc

SEQ ID NO: 596 - DNA, 760 bp, Homo sapiens
cgaaatcgacatggagaattcaaagaagctcctggcagcagcaaaactcttagctgactccactgctcgcatggtggaagctgcaaagggggctgcagccaacccagagaatgaggaccagcagcaaaggctgagagaagctgcagaaggcctccgggtagcaaccaacgcagctgcccagaatgctattaagaaaaaaattgtcaaccgactggaggttgcagccaagcaggccgcagcggcagctacacagaccatcgccgcctcccagaatgcagctgtttccaacaagaaccctgcggcccagcagcagctggtccagagttgcaaggcagtggctgatcacatccctcagctggtccagggagtgagggggagccaagctcaagctgaagacctgagtgcccagctggctctcatcatctccagccagaacttcctccaggcccatgaagcttgtggtccgatggaaatcgattcagctctgaatacggtgcagacgcttaagaatgaactgcaggatgccaagatggcagccgtggagagccagctgaagccacttccaggggaaacgctggaaaaatgtgctcaggacctgggaagcacatccaaggcggtgggctcctccatggcacagctgctgacctgtgctgctcaaggcaacgaacactacacaggggtggctgctagagagacggcccaagctctgaaaacactggcccaggccgcccgtggagtggctgcatcgacaaccgacccc

SEQ ID NO: 597 - DNA, 1924 bp, Homo sapiens
cccattctctaccttctttcactgtgttgttgtttttttttttctctctagaacatttcccacattctcatgtacggtttgtgttacttatttggtctgttgtttgtctctcctattggggatttttggctgttttgctcactgctccacggcttgtgcctagtgcctagaatagtgctgaacacacagaagatgcttggtccatatttgttgcattcatgaatcaatcagtctttgaccttcactggaacattgagtcaactcacattttggaaagggccaatgcttttatttgttcgtactgttttaagctgtgctttctatttgttctacctcttccatgtttccttttcctccttgtggatttattctctatctcattccactttctctctgctactttggaagttttctatttttttaaatactttattcatttaacaattgtatatgttaactatataaagggaaaattcatcaataactttaccttttcactgtacagtatgaacttaaatgactttaattttgaacatctgctctccttgagttacatgatatgatggtttggacattttcattttctttttaacctcacaagaacattatcatcattttgttgctcattatgttgcccccaattcctcctgcatttcagacctttcttctggtattataataccttcctctgtctgaaatacattctttagactccttggcaaaggtctactagtgacaaactcttttgcgtgttatgtgttggaaaatgtgtttcatcctcattcatgaaagatatttttgcttagaatacatttatggtttggtaattatttcctttcctcaatggcaacattacactgtatttttttatccatcttagcttctgagaagttagctgtcaatcagactggaattgctctggtaatccttccactccctccagcggccttaacatctttgaccttagtgctctaaagtatgatgtgtctaggtgtggatttcttgtgattcactgcaatatgtgtatcttccactagttgtggaaagtttttagccattatctcttctaatgttgtcccaatttttctttccagggctccaattagatatttagtaggccttctcaaatggctttccacctctttttctttctgtgccgcattcccaatcatttatttttcaatttattattattttttgggcagaagggaatgtttattaaaaaactttagaaggccaagtgcagtggctcatgtctgtaatcccagcactttgggagggtgaggcgggcagatcatgaggtcaagagatcgagatcatcctgaccaacatggtgacaccccgtctctactaaaaatataaaaatcagccgagcatggtggcacgcacctgtagtcccagctactcaggaggctgaggcaggagaatcacttgagcctagtgggtggaggttgcagtgagccgggattgtgccactgcactctaacctgggcaacagcgggactctgtctcaaaaaaaaaaaaaaaagaaaaaaggaccacaaccctaatatgtcgtaaggctgtcagatcatatttaaatatataaacaaaatttaaatttgaaatttaaattaaatagatgttattctagtacatcacagaaacccaaaggaaactttagatttgacacggcataatcctgggccaatattcaggattctcccactgtgggataatgatgaaggggacacaactgcaggagagattttaaaaattttgagagaatactaggagcaacctcatgctgaaacatacaaaaattcagataaaacaataatttttaaaaaccaggaaaactgccaaaattgacttaaggaatttttaaaggcctacatgaagaaattcgtaacaacaattgcttattctgccaccaccacgaaac

SEQ ID NO: 598 - DNA, 2460 bp, Homo sapiens
cttgcccttcccctcagcagtggacctttaaaataaacatcttagaagcggagataaaagcctttgctttatgcccttttcgtagcaattccccttagaagagacatgtcctatatttccactgtcagtgttttctgctgctagggttggggcacgcctctgagagaataagcccagaaatagttacagcttccaacccagagacctgcatttggatgactgtgtacagatgacttcctgctatggttgcttatgcatgtttgtgattattaatgggatattaatgtttagtctgtcattagtcaacaggcagagctcgccctgcaggaggcaattaggattgcccaggagtccaacgatcacgtgtgtctccagcactgtttggtgaggccatcctctggtcttgggagttttgttcacgggttgaattggccttcacaaggccccgttgaattgggttgttttgcagttggagcagagatcttcagcagcaaaaggaaacaagttaggtggtcatgggaattcagaaagggcaacttatctttacttacctttcttaattcatgacatctgttttgcttttggcatatatctgctctacaaagtttaatgcaacttgccatgaaagaagagaaacctttatcacatttagcactggcattaacaaaagatgtatactacacttagtaactgggtgagatgttgtcctgtaatagcaaaatcaccagggcagtggaacacagaagctacttgacaagcacctgagaatcttatttctcaattgaaggccatatgggagcttcatgctttttttctgaaacacctgccactcagtggctgtcaggtgaagcagaacaatgactcatttatttcagcctggttttaatgatgttgatatgtttgacaggtctcattgagattcttgatatttcttgaaagagtatttgagaggattcattttgtcccttttaaattctttcttatgaccacattgatatttcactagaacatcagccattgccactgttatgatatattttgatgatttctcttgccagagctggctttatgtgctggggcagaagagatccgatagctatgttctgctggagcattctgtgaagaaggcagtacattttgggttaccgtacctcgcctccctgggaatacaagtcccttgttcaacagagagcttttgctgggaagacggcaaacaagctgatggatgccctaaaggactccgacctcctgcactggaaacacagcctgtcagagctcatcgatatcagcatcgcacagaaaacggccatctggaggctgtatggccgcagcaccatggcactgcaacaggcccagatgttgctgagcatgaacagcctggaggcggtgaatgcgggcgtgcagcagaacaacacagagtcctttgctgtcgcactctgccacctcgcagagctacacgcggagcagggctgttttgctgcagcttctgaagtgttaaagcacttgaaggaacgatttccgcctaatagtcagcacgcccagttatggatgctatgtgatcaaaaaatacagtttgacagagcaatgaatgatggcaaatatcatttggctgattcacttgttacaggaatcacagctctcaatagcatagagggtgtttataggaaagcggttgtattacaagctcagaaccaaatgtcagaggcacataagcttttacaaaaattgttggttcattgtcagaaactgaagaacacagaaatggtgatcagtgtcctactgtccgtggcagagctgtactggcgatcttcctcccctaccatcgcgctgcccatgctcctgcaggctctggccctctccaaggagtaccggttacagtacttggcctctgaaacagtgctgaacttggcttttgcgcagctcattcttggaatcccagaacaggccttaagtcttctccacatggccatcgagcccatcttggctgacggggctatcctggacaaaggtcgtgccatgttcttagtggccaagtgccaggtggcttcagcagcttcctacgatcagccgaagaaagcagaagctctggaggctgccatcgagaacctcaatgaagccaagaactattttgcaaaggttgactgcaaagagcgcatcagggacaacgtttactaccaggccagactctaccataccctggggaagacccaggagaggaaccggtgtgcgatgctcttccggcagctgcatcaggagctgcccccccatggggtacccttgataaaccatctctagagaggacacccctgctgggctgctgggcagagtataagattttggacttgttcatgccccccctccccctataaatgatgtatttgtgacaccctatcttgtcaataaacagcattctgattaaaaaaaaaaaaaaaaaaaaaaaaaaaaaaaaaattccccccc

SEQ ID NO: 599 - DNA, 1751 bp, Homo sapiens
acagagcagtcggtgacgggacacagtggttggtgacgggacagagcggtcggtgacagcctcaagggcttcagcaccgcgcccatggcagagccagaccgactcagattcagactctgagggaggagccgctggtggagaagcagacatggacttcctgcggaacttattctcccacacgctcagcctgggcagccagaaggagcgtctgctggacgagctgaccttggaaggggtggcccggtacatgcagagcgaacgctgtcgcagagtcatctgtttggtgggagctggaatctccacatccgcagcatccccgactttcgctctccatccaccggcctctatgacaacctagagaagtaccatcttccctacccagaggccatctttgagatcagctatttcaagaaacatccggaacccttcttcgccctcgccaaggaactctatcctgggcagttcaagccaaccatctgtcactacttcatgcgcctgctgaaggacaaggggctactcctgcgctgctacacgcagaacatagataccctggagcgaatagccgggctggaacaggaggacttggtggaggcgcacggcaccttctacacatcacactgcgtcagcgccagctgccggcacgaatacccgctaagctggatgaaagagaagatcttctctgaggtgacgcccaagtgtgaagactgtcagagcctggtgaagcctgatatcgtcttttttggtgagagcctcccagcgcgtttcttctcctgtatgcagtcagtgcagccctttgcctccctcatcagcaaggcacccctctccacccctcgcctgctcatcaacaaggagaaagctggccagtcggaccctttcctggggatgattatgggcctcggaggaggcatggactttgactccaagaaggcctacagggacgtggcctggctgggtgaatgcgaccagggctgcctggcccttgctgagctccttggatggaagaaggagctggaggaccttgtccggagggagcacgccagcatagatgcccagtcgggggcgggggtccccaaccccagcacttcagcttcccccaagaagtccccgccacctgccaaggacgaggccaggacaacagagagggagaaaccccagtgacagctgcatctcccaggcgggatgccgagctcctcagggacagctgagccccaaccgggcctggccccctcttaaccagcagttcttgtctggggagctcagaacatcccccaatctcttacagctccctccccaaaactggggtcccagcaaccctggcccccaaccccagcaaatctctaacacctcctagaggccaaggcttaaacaggcatctctaccagccccactgtctctaaccactcctgggctaaggagtaacctccctcatctctaactgcccccacggggccagggctaccccagaacttttaactcttccaggacagggagcttcgggcccccactctgtctcctgcccccgggggcctgtggctaagtaaaccatacctaacctaccccagtgtgggtgtgggcctctgaatctaacccacacccagcgtagggggagtctgagccgggagggctcccgagtctctgccttcagctcccaaagtgggtggtgggcccccttcacgtgggacccacttcccatgctggatgggcagaagacattgcttattggggacaaattaaaaacaaaaacaactaac

SEQ ID NO: 600 - DNA, 1707 bp, Homo sapiens
ggctgctctggcccctcagtgcctcctgatggtgccaggggtggtttgtcctccttatccgatacggactctgtcttggaggagacgggagaccccatgggctctgaagtcaacagaccatcaacctctttctcctttcctttgggctcctcctttaagatccggggaggaaaaggatccaggctgttctcaggggagctactgggctgaagcttaaactgggccccaaactttctcagttcttccagttggaatcgtttctgttcattctgaagaccagggactttcccagctatccgagccagctcctggggctccagagttctcccaggttccttggtagagagttcttttacatctgtgggggccagggagatctttggagaagctggagaaatggagcccactccaggatctgagactgatgaggtcacagggatggaggctgaagaggttggcactgccgagccgatgggaggctctggacaggaagctgagattggggcaggggcagcagacttgggagaacgcgggggatacatccggcccactgcaggaggaggtggaacagaagtttctccagaaggcctattactgggcgaagacagagtcttggcacctctcagaggccgctgtgcctttggggacatgcgggaagggcctccattgataccacgggcctcagaacctgggccagggctgctgttgtccagatggtgagggccacgaggtggcaaagagctaaggccaggccgaccgccccgagagctgctgcatcgaactcctccccggggaccttcccggactcgttgaggcagagggatatacttcccctccctggatgccaagctggggctctcccgccctgagccctgccgctggactgcactgtgcttctcctcttcagtgcgcccatcgtcgttctccatggcgatccgtaggcggtactgggggcttgattcaatctctcgagccaactgggccgcacgcagctctcgctgacgaaactcttctgagttgtccttttctaagggcaccgtataagaagaaagactgctatcataggtagtcttcacaccgtagttctcctcattgaacttgaacatttcattggggtcccatccattggacatgtcagactcgaggtcatagtcgtcgctgttgctgtcacccccctcccagcgctgaagcaccttctctttgtgttccccattcactttcgagttcatggcaatggctgaatcggtgaacttgtctttagtagcatagttgaagtcaacatttcggaagtgaacaagcatgacatcacttggcttaaacaccatggtgtccacaatgtcctcccgacgagggccacctgctggctcagatgctttccggtgcacagcatccacggctagttcaaactttgagcttagcgtcttgaagataccctcataagtggtaccatttttcacctttacatcacaagtggagcccacaacagctgtaaggaaatgcagcattctggaattgttgtagacgccttcaaacacaggtgactgtgggggtccctttcctgtgctctgtcccctggcgctgccgatggcggctgcccccggcctctcctggtgttgctgcggcggcggcggctgcggcgccaagatgccttcggctccccggcggagcccgctcccggcagcggccacaggccccaggcagggggag

SEQ ID NO: 601 - DNA, 2417 bp, Homo sapiens
gagggtgaaactgctattgccggcggctcctgttttaccgcgtcagcatgctggtgcatttatttcgggtcgggattcggggtggcccattcccaggcaggctgctaccgcccctccgcttccagacattctcagctgtcaggtactctgatggctaccgcagctcctccctcctccgggccgtggcccacctgcggtcccagctctgggcccacctccctcgagcccccctagctcccagatggagcccctctgcctggtgctgggttgggggagccctgctaggccccatggtactgagtaagcatccccacctctgccttgtggccctgtgtgaggcagaagaggcccctcctgccagctccacaccccatgtcgtggggtctcgctttaactggaagctcttctggcagtttctgcacccccacctgctggtcctgggggtagccgtcgtgctggccttgggtgcggcactcgtgaatgtacagatccccctgctcctgggccagctggtagaggtcgtggccaagtacacaagggaccacgtagggagtttcatgactgagtcccagaatctcagcacccacctgcttatcctctatggtgtccagggactgctgaccttcgggtacctggtgctgctgtcccacgttggcgagcgcatggctgtggacatgcggagggccctcttcagctccctgctccgacaagacatcaccttctttgacgccaataagacagggcagctggtgagccgcttgacaactgacgtgcaggagtttaagtcatccttcaagcttgtcatctcccaggggctgcgaagctgcacccaggtggcaggctgcctggtgtccctgtccatgctgtcgacacgcctcacgctgctgctgatggtggccacaccagccctgatgggagtgggcaccctgatgggctcaggcctccgaaaattgtctcgccagtgtcaggagcagatcgccagggcaatgggcgtagcagacgaggccctgggcaatgtgcggactgtgcgagccttcgccatggagcaacgggaagaggagcgctatggggcagagctggaagcctgccgctgccgggcagaggagctgggccgcggcatcgccttgttccaagggctttccaacatcgccttcaactgcatggtcttgggtaccctatttattgggggctcccttgtggccggacagcagctgacagggggagacctcatgtccttcctggtggccttccagacagtgcaaaggtccatggccaacctctctgtcctgtttgggcaggtggtccgggggctgagtgcaggtgcccgggtctttgagtacatggccctgaacccctgcatcccactgtctgggggctgctgcgtccccaaagagcagctgcgtggctccgttacatttcagaacgtctgcttcagctacccctgccgccccggcttcgaggtgcttaaagacttcaccctgacgctgccccctggcaagatcgtggccctcgtgggccagtctggcggaggaaagaccaccgtggcttccctgctggagcgcttctacgaccccacggcaggcgtggtgatgctggatgggcgggacctgcgcacccttgacccctcctggctccggggccaggttgtcggcttcatcagccaggagcccgtcctgtttgggacgaccatcatggaaaacatccgctttgggaagctggaagcttccgatgaagaggtgtacacagccgcccgggaagcgaatgctcacgagttcatcaccagcttccccgagggctacaacacggtcgtcggtgaacggggcactaccctgtctgggggccagaagcagcgcctggccatcgcccgagcccttatcaagcagcccacggtgctgatactggatgaagctaccagcgcgctggatgcagagtccgagcgggttgtacatgaggccctggaccgggccagtgcaggccgcacggtgctggtaattgcccaccggctcagcactgtccgtggggcccactgcattgtcgtcatggccgatggccgtgtctgggaggctgggacacatgaagagctcctgaagaaaggcgggctatacgccgagctcatccggaggcaggccctggatgccccgaggacagcggccccaccgcccaaaaagccagaaggccccaggagccaccagcacaagtcctgagaagggccccctgaggtgtggtcgctgccaagcatcagtgttagggctggggctcagcctgggggagcctactggggactgagcccccatgagggccagcatgtggagagtcgctgcggctgctcctgctcacaataaagccggggccgagcagctggcaggggaggccaatccctccctcccctccccagtcctgccggctgcctccccccc

SEQ ID NO: 602 - DNA, 2168 bp, Homo sapiens
  misc_feature 858,864,904,1593,1806,1818,1936,1937: n = a,t,g, or c
gaaaatcatatttttactttgagagagcaaaatcccatattaatacagtcctggattttaacttttggtttcctctggtgtttctccacatacccctccattttttccttccattaaccctgttaccttaagttctttagtctctttgcctcaattcttatatctttattttatttccagagttctatggttcccacctggctgcaggacaaggtgctttataagttggcataaagacacaggctgattccaacttctctttctgaatttctttctactctttctatgcgcaaacatcttttacccaaactggtccttggtcccgttctctcctccctgtgtacagtgctcctgtttcttttcagtgaccgcttggtagcattgatagactttgagtcctgtggccagatagatctgcatttctatcctgtccctatcattttttagaaatgtgactttgggcagaatatttcatttcagcctcaatgtttttatttttagaatgggaatcataactaccttatgggatgcttatgggcatggtacttagggaactgtcctgcccaggttctattttctgccttttcatcccaacagtatgcatacgtgcttgctgatgaagttattgaacatcagaattccagagctggctacatcacagttcgtggttagccattctctacctgccactttcacaccttccctaaccacatcttcctttgataggacctaatcctatcagtgagcatctaaagatcattttcctccttctacctatgatcgtgaaaactatgttcatggacattcagaatgtctggtatatctgcccatatcagaaattgacagccatttcatggncactgnctgcaaccttgagcactaattcattttctcagcatttggntcctttcatgtaaagtgagaattatcgtgaacgtcgaatgctctgatgcaaagaatacctctttaaacgaagttttccaccagcttttattcagagtatcatttaataaagtgcaccatgccattaccaagggttgtttagacaagccctcggagtttatttaagtagacttctgccccatattgattcccaattataacatgtttagcatgaattaaacctgccagtgttctcagacaatgtgatgctctccctgcaattctgccctcgtctgtcagctacaagagtgtcagtgtttccttgttcattctatttaaaacgtaattctcaccctcttgctcaaatgatttaagccatatgtgaagtctataaattttgttttctcagacgaccaccttctttcccttcttactatttctcactcccttttctctattttccttattgtctcatgtactaaaataagactttaaattttttttctactcaaagtaagaataacaatgcttatatttttctagtttgatctactttttagtaataaatatgggctattagttgtgtgtgtgtgtgtatatatatatatatatatatatatatatatatatatatatatatatgtgggttttcatggaattaactttgtctctttttgcccatgagtttattggtgagaagacacaagtatnactgttggggttcttctgcattctttggttattcatgaaaaagctaactgaacctttactggttgtttaaattttgtggtcatgtgtgtttttaccataggctcttgagggaaatatataaaaggccatgggaaaattggtggtatgaaaaaaatctatcagtatattcttctcagatacccttttcgggaaaaattaagaaactttgaaaangattcataatcngaaatattatctagtttaacttttttgaatggagagattttataggctggcaacgggagcttctgacttttcttctgcatgggcactgatgatggggggagtgactgtgtttgcgtgnnttttaggtagaagaaagggagcctggtaacaacaaactgtgagactggttgtattacgttacttgttaatccttctgaaggagagataccagggcctctgccctgcatccttccatgctagaaatattcatagttggaggggggggggggtgccgcccttgggcacgttggatttttttttaactattgattttgaaaaaaaaaattgtttttgtaattatgagtaccagg

SEQ ID NO: 603 - DNA, 1433 bp, Homo sapiens
  misc_feature 1361: n = a,t,g, or c
ggcctcctcctaagagtgaggcatgtgggagtgaggctggacagcctcctggaagctctcggagctatgtcttctgttcctttctatggccatcctatccctctgccctctcagggaaaggggctgtttgccacacagctcatccggaagggggagaccatcttcgtagaacggcccctggtggctgcacagtttctctggaatgcactttatcgctaccgaggtgagtacatctctcctactcctcatggcccagtcgtctttgtgcatggaagtgagctgcatacatccctactggctgacgtctctggaactctgggtgttgggaggaaatgctgtcttccattgaaggactgtgcctgagaaccatgcctctgtccagtctcaggtgtttgaggcttattcctgtggtgggaggctcttcagatgtgctccctgagggagcacagcaggacttaggcgagtttgattccatggtatgagggacatcatgctgaaggcccagtgccaaagtggagtcctccaccaagaggaggctacatggcccttgttcaaagaaagctgagttagggatgagcacaagtacgatgcccttatctttgctggccacatgctttttttcacacttttctttttttggggtctgggggagggggacggagtttcgctcttgtcacccaggctaaagtgcagtggtgcaatctcggctctctgcaacctctgcctcctaggttcaagcaatcctcctgcctcagcctcccgagtagctgggattacaggcacgcacaaccatgtccagctaatttttgcatttttagtagaaacggggtttcaacatgttggctaggctggtcttgaactcctaacctcaggtgctccacttgccttggcctcccaaagtgctgggattacaggcttgagccaccgtgcccaacccacacatttcttaagctagagagacacaatgaaaggagggtcagttggccccagagtatgggaaaagcccagtttgggggtggtaggggagccccacagagtgagtctgattaagaagcaaggaaagttagacaataagggccaggaggtccttgagagggaggaggggatcatctgcctttgggatgcacatgaaataaattcattcatccattcatccatgcatgtaattattcatttactcactttccaaacctttatgaaacactagaatggtgcctggcacatagcagctgctctgtagggctgtgaaagggatagatgtggcctctgctctcaagatattgttgtgtctggctctcaccgtcagcctgtgaccactgccttagggcaatagagaaggcagaggagagtgcccagagggngaccgggaatccaggccaggttctgcctcacccagagctgtgcactgtgcgcaaagaccaccaccacgagac

SEQ ID NO: 604 - DNA, 2168 bp, Homo sapiens
gcaaaagagggattgatactctagaggctttttatttatattagctacactgaagtatgacacttctgattgaatttagtgagggatagagttttgagatactccagttatcaccagtaaaacaactatttacattgttttcttgagatattatcatctctaatccatgttgcttgtatttcctttttgaaggaatctaccttactgagacttggcatttcctgtttccaactagctataagagttttgtttggttagcatttgtatgatatatatcttccatcatgatgcttacaaacatcctgcatcctttaaagtgtgtctcataatcagtgtatatttgggttttgtgttttcatcttatctggtagtcttagtaattggaatttgcagtccatttacatttaatgtaattactgctacattttacaatttgctggtgtatgtgacccagcacctttttctttctgcttttattttcttttgaattaacttttatgattcattttattctttattactctagttatacattcttatactaggaattataacatgcatcattgacttgttatatcctctatcaatctgctatttatataaacttttactaaagattataatctgcactgttgactatttctagaaccttagaaggctttaatgccatttacttgctgccttttgattattttaattttacatttgttaaaccaaccatatagacacaaatgtattactagtatgacttggtactgtcactactaagtgaatatttatattatcacatttaccgttttctttgctgatcatttctttaacaattttatatttccctatgggatctttttttttttttaacaacccgaagaactctctttactattttcctgtagtaactgtttcttggtagtacatttcctgttttcttttttttctgatagaatatttcactttaaacttgaaagatattttcatcagataggaaagtctagattgcctattatagcaaataatgttaaaatgtcattttatgtcttcaggcttctctcatatttttagaagttaggcttatagagggtaatatgtcttttttaaaaaaatctgttgctaaaggtttttctttctggttttcagcaatcttgctatgattcattttcctaggatttgtcttttttgttgttgtttccctttttattctgcttggggttcctgcctgaactttctgataccataggatggtgtttttcttcagtttgggagattcttggccattctcttttcatgtgttgcttctgccccattttctctctcctgttcgagattctaattatgtattattcttagatgtttgattatgtcacacattatctcttacactcttccatttttcccattgaattttttctctgtcttttagtttggctatttctgttgacttgtcttttatttcactaattttctcatctgtttcatctgctctcaaacatctaatgagttctacatttcagatcatgtgtatgtgtatttttttccttgcatgcctacagttgattaaagatttttattaatattctctgaggaaattcttaattgttttatctatctttttcttgtttcttagacatattaattatatttattttcacgtaattatcaactaattccaatatttggagtatctgtttttttttcttggcttttgatcatgtagtactgtcttttggcattactaataaattttttatcaaataatgggtattttgttaaataaaaaaaagatgtttgtcttcacagagggatcattttttccccactatgcagatagatggctaagcaccttaatgtaattagtgactgtactaatttcagggcttagttgtatttctcatgagactcacttggcctctttttacccctggccctccaggtgttttaactgggagcttgctatgtttttttgcagcccttcttctggcatgtaccgaacactaatctttgacatgtgagaatgccaaaatctctgctttactcttcagagtctttctatgtggatattaggttgttgcaaaagtaattgcgatttttgccactgcagttacttttgtaccaacataatatctacgtacaaaaaactgcaattacttttgcacccaccaccacgaaac

SEQ ID NO: 605 - DNA, 1704 bp, Homo sapiens
caaggagtgatttaacatcagcatttgaaatgtagtcttcatctcctgggatccataaaaaaatgtgaacagggaaatggtggctaagcagagcctgaaataataacttggcaaagaaatgagtttatcaggtcgagtcaaaacatggcatcccctgttacactcaagaaatgctttcttcatgtaaatgtttatacgggcatatataatcacaatgggaacagttaaaaccccctcccttcaaaaaaagaaaatctatatcagttgggtttggttttggttcttcattggctcaaggcagttaactgtctcagtatagcctttggggagatttaacctcattctagccatttttccatcctgaaggccaagaaggactattagaagggtttttgaggggtttcggaggtgagggcccaagacccccataatgacatcattaggtattcttgaaaggtgttaacagaccagcacgctcgatgtgttgtacccttcatttatttttttttctcagcatcccaagtagtccatcagtacattccccttcaccttacctgatcttcatttaatgcccagtctgtaactaatgttctgtttaaagctctcttaatttgttggctatgagtgatttgtgaatctgggatgtaaccctgagtgaggagaaaagggcattgagccagcataaatctgaatgggcagaagccacaaacaaatgggagcagaaaagaagggcgagctcccccgcgccgcaccccgtgtataatccagtgttaacctctgaggaacacctcggctctcccaactgaggagagacaaaagagggattctttttacacccaggctggcgcattttcaagtgacaatctcgggctctagttgcctttgagatatccactctgctctttctcccaggcctcagaccaagaaaaacatgctctcaagattagcccataggcagttcttgtgacctggctgaagaaagaaaggagacctgtttgttttaaaagtcgggcgcaaagtgtcaggtggctttgatttatgacagaaagaggaagaagaaagttggagtaatagcactatccaaataaccctgcccaggaaacttgggggtcaagagagcttatcaagagccttttataggtaagctcttccgtgtgaaagagaaaaggccggaaagagggagagtgcccagagagcaggctgcgaactcacttccaatgggattggagtctgttgtattcttaagagatagcctgatatgtggttgataggtgaatcaataaacaccaacgacaactaaaaaaaaaaaaaaaaaaaaggaagaaaagaaaaaaagaggaaccagccctgtcatggaatttctctccttccctgcacagtaaagacttttgggttttcatggataaaatcaatgtcggtactgaaactcctactctcccctcccgccccatctcccccgttgccgaagatggccaagttcaggcctgtgcaaatgccgcttccctctgagcctccctctcaagggccacgcaggcagctgcagcagggccagctgcaggatggggctgccggtcactgaattgtcgttcaaatgcatcatctttgtggcgtctttctcatgcgagcaaagccacgtgctctcctgtctgctgtcacatctgtgcctggattgcttaaatattgtttgtgatggggacaagctcc

SEQ ID NO: 606 - DNA, 1661 bp, Homo sapiens
gaggcgggagtggacctggtcagccctaccccactgaccccaccggacccaggcgcggtctccgccacagccacagcccctgcccctgctgcggcgcggcgaggcgaggcgatggccaaggtgtcggtgctgaacgtggcggtcctggagaacccgagccctttccacagccccttccggttcgagatcagcttcgagtgcagtgaagccctggcggacgacctggagtggaagatcatttatgttggctcggctgagagtgaggaatttgatcagatcctagactcggtgctggtgggccctgtgccagcagggagacacatgtttgtctttcaggccgacgcccccaacccatccctcatcccagagactgatgccgtgggtgtgactgtggtcctcatcacctgcacctaccatggacaggagttcatccgagtgggctactacgtcaacaacgagtacctcaaccctgagctgcgtgagaacccgcccatgaagccagatttctcccagctccagcggaacatcttggcctcgaacccccgggtgacccgcttccatatcaactgggacaacaacatggacaggctggaggccatagagacccaggacccctccctgggctgcggcctcccactcaactgcactcctatcaagggcttggggctccctggctgcatccctggcctcctcctgagaactccatggactgcatctaactgcaggaacccagagtgtcccagcacgccgggaggggcaaccaggcctccagcgagtcctgcagggcccatctagaggactttgggggccatcagctgcaatccaggtctgtcaaactcagcccctaggaaagaacaggccttgggtctcccctagtcctggccagaaggatgatctcgcttttcctctacaggcctataagaagcaggtacttcagttctaaattctgacttgtgttcttttcgtcttcataaattctaactaaggccactgtgccactgtgcacccttgagtaccattgatccaaagctttcccacagacctccctggcccacctagaggctttcttggtcagtgcctgtcaaggctccagtcctgctgagccaaaggctttgtcattcctttctcttcctgtacatctgagcagacccactccagctttctggtgtcacaggcgggaatgttagttagtaggtagacttagatcccatttctgtcctgctcccaggaagattcttaggtcctcttcaatccagcagcccctcccagaggtgtgatcagcaggatgctgaggaaccatgttgcctttcctgtcaatcacagccaccttcctgttatctcctaaatggatctggcttttcctggaggctgccatggttggaagatggtatcagagggcctgcctgggcagtctgtctccgggccagggtcagggaccctctgcctctggcagccttaacctgtcctctgctaggaccagggtgatttcaagccagggaagcaactgggaccctgaaaactgtccctccccagcccgctccccctctctgtgccctggtccccttgctgccatgtggatgctgttgtgattgctgtttgtatattatcaaaatgtttttatattaaaaatgtttggtctgaaaattaaaagcacttcattt

SEQ ID NO: 607 - DNA, 478 bp, Homo sapiens
gcagccgccgccgccatgagcaccaactcgtttgatggaagcattgtgagctcatatttgacaacgcgcatgcccccatgggccggggtgcgtcagaatgtgatgggctccagcattgatggtcgccccgtcctgcccgcaaactctactaccttgacctacgagaccgtgtctggaacgccgttggagactgcagcctccgccgccgcttcagccgctgcagccaccgcccgcgggattgtgactgactttgctttcctgagcccgcttgcaagcagtgcagcttcccgttcatccgcccgcgatgacaagttgacggctcttttggcacaattggattctttgacccgggaacttaatgtcgtttctcagcagctgttggatctgcgccagcaggtttctgccctgaaggcttcctcccctcccaatgcggtttaaaacataaataaaaaaccagactctgtttggatttgggtcc

SEQ ID NO: 608 - DNA, 654 bp, Homo sapiens
tgggaagcgggacttgaggtgaagggggtggagcaggtaggagcgggatgcaaaggagcgccaaggctggttccagccgcaagtggatgagaaatcctagtttcttcatgatttggagtaaacagagaagaaacagaaccctgaactggacttgcatgactcggcctgaggggcggaactggggctagacctaggggcgtggccttttaaatactccaaggggcggggctaaaggtggaaccagattgggagcggggcttggttgaaattcctagggggcggagacgagggctgggcggggcttaagtgacaaggcctagggatggggctaaggctagggcttcccatccaggttctcagctaccacggatacaggatgctcatcgatcgggtttctacctatcctccacgttgctacagtcctgtacacaggacacatatatttgcagctctaataggaaacagactctccttgacactcactcagtccttttgggccttttagttttccctttcattgttgtattgataacttctcctgtagagggaagccattgataattatttaaatagaacctttttcctggaaacttgctgaattctgatagctgtcagtttattatttgaaccatcaaatataaatattttctctgc

SEQ ID NO: 609 - DNA, 1435 bp, Homo sapiens
ggccgaggcggacggaccgcttaaacggctgctcgtgccgattcttttacctgagaaatgctacgaccaacttttcgttcagtgggacttgcttcacgtcccctgcctcaagattctcctcagcaaaggcctggggctgggcattgtggctggctcacttctagtaaagctgccccaggtgtttaaaatcctgggagccaagagtgctgaagggttgagtctccagtctgtaatgctggagctagtggcattgactgggaccatggtctacagcatcactaacaacttcccattcagctcttggggtgaagccttattcctgatgctccagacgatcaccatctgcttcctggtcatgcactacagaggacagactgtgaaaggtgtcgctttcctcgcttgctacggcctggtcctgctggtgcttctctcacctctgacgcccttgactgtagtcaccctgctccaggcctccaatgtgcctgctgtggtggtggggaggcttcttgactgtagtcaccctgctccaggcctccaatgtgcctgctgtggtggtggggaggcttctccaggcagccaccaactaccacaacgggcacacaggccagctctcagccatcacagtcttcctgctgtttgggggctccctggcccgaatcttcacttccattcaggaaaccggagatcccctgatggctgggacctttgtggtctcctctctctgcaacggcctcatcgccgcccagctgctcttctactggaatgcaaagcctccccacaagcagaaaaaggcgcagtagagccagctactggagtcattccgtttccactcattcacccaacctcagggttctccccatctgagccagcctgctggtgtgacttactcatcctccattcctctgcacttgcagactttctgagccagggttttcttttagtggaaacaaatggttgatggatccagatccttagaaaaggagaggatgggggtagagtctcccaagccaaaattttgacatttgagtgctttcgtaagccctgtacatgtactattaattcagtcattcagccaagcctcctcctctagcagcaatttccagctgtttaacactatcctgggcaaatgttttaccctgtcctccagcctccctgcttcccttctggccctggaagactgagtctggacggcagagtggagggactgggaggctgtggctgcctccctccctcagcccggctgggactgtctcccggaccccagtgctggggtgggggaagggggacggagaatgactcaggcagggccccagggtggggtgaggaggttcctgctctggcaggtctaggcggaagggagtggagatggggctggttcctgctgcagtgaggggaacagatgggacaataaagactggagactcagttgaataat

SEQ ID NO: 610 - DNA, 1943 bp, Homo sapiens
ttggtgtgtgtgtgggggggactcggcttgttgttgtcggtgacttccccctccccttcaccccttcccctccccgccgccgctgcagtggccgctccctgggccgtaggaaatgagcgataacgatgacatcgaggtggagagcgacgaagagcaaccgaggtttcaatctgcggctgacaaacgggctcatcataatgcactggaacgaaaacgtagggaccacatcaaagacagctttcacagtttgcgggactcagtcccatcactccaaggagagaaggcatcccgggcccaaatcctagacaaagccacagaatatatccagtatatgcgaaggaaaaaccacacacaccagcaagatattgacgacctcaagcggcagaatgctcttctggagcagcaagtccgtgcactggagaaggcgaggtcaagtgcccaactgcagaccaactacccctcctcagacaacagcctctacaccaacgccaagggcagcaccatctctgccttcgatgggggctcggactccagctcggagtctgagcctgaagagccccaaagcaggaagaagctccggatggaggccagctaagccactcggggcaggccagcaataaaaactgtctgtctccatcgtctcatcctcctttcagttcgttggtagagccctcagaaccatttaagagactctttatttttctctttctcccttttttttttaaatttttatttttacgtagaagctcttggacaacagctctcgttctccttccccatttccactgtatattttttaatgtattcccttcagggattccctgtccccaacaggaatttttaaaccaaaacaccccaacttggcagctttttctgtggaggacagacggccggccggacctctgagcacatagtgtcctgcccaccctaccagctcctccagccctgccgggcacatgcccgggggacgcctgccctgcccaggtggcctcctggcccgccctcacctctgatagactttgtgaatctgaactgctctactttgagaagatgaccggtttggagtaatcagaatgaaccctcctcctttttaagggtttttttttttcctttttctaaaaagctatgtatcgctcctattgaaagaccagatccttagagaagtttgtggtataaaaaggaagtggggacagattcgcagcacagagtcgctggcatgtttcactcctgcttctctcagccagctgtttaagcctgcggcgccagcctcacggagggccgtgtgacactctcgtggtatgtatgggagatggcagcagtgaagcagcagccaccagggagtggccatttggggttgggacagggagggtgttttgggtggcatagaggttttgtattgagggccagtgatgatgttttgatatttatttcctgctacttaaatttgaatctgagtgaattgtacctatttctgatgatgtcggtcttgcaaagcgacagattcataaagtaatgatgaaatctttctttcttcccgtgtgtatttctaagaaatagagccaactgattttgtatgtaaataccaagagcaatttacctggtactaaacccgcaccccagtgcggacccttcccagccctcatcccacttcctttcctactgtcctggaacctgtctccattgtgtgatccagccctggttctggctgtggtcagcagatgccagtgaagggttttgtgtgtttaggcctcatttctttgtctttttcctactccgttcctggcatttgctgatttctagtgtatactctgtagtctcagttcgtgtttgattccattccatggaaataaaaagtatgttgtacatactgccgaagaattgtcttgcaagttaaggcttccccctttactataagactataaataaaaacttattttatcctt

SEQ ID NO: 611 - DNA, 1714 bp, Homo sapiens
cgccaccgccatgggctcctgaggctagcttgtcactttctgcaaaggtttccctcagggagcctcctgctgccaggcaccatgacagtgaggggggatgtgctggccccggatccagcgtcgcccacgaccgcagcagcctcgcccagcgtctccgtgatccccgagggcagccccactgccatggagcagcctgtgttcctgatgacaactgccgctcaggccatctctggcttcttcgtgtggacggccctgctcatcacatgccaccagatctacatgcacctgcgctgctacagctgccccaacgagcagcgctacatcgtgcgcatcctcttcatcgtgcccatctacgcctttgactcctggctcagcctcctcttcttcaccaacgaccagtactacgtgtacttcggcaccgtccgcgactgctatgaggccttggtcatctataatttcctgagcctgtgctatgagtacctaggaggagaaagttccatcatgtcggagatcagaggaaaacccattgagtccagctgtatgtatggcacctgctgcctctggggaaagacttattccatcggatttctgaggttctgcaaacaggccaccctgcagttctgtgtggtgaagccactcatggcggtcagcactgtggtcctccaggccttcggcaagtaccgggatggggactttgacgtcaccagtggctacctctacgtgaccatcatctacaacatctccgtcagcctggccctctacgccctcttcctcttctacttcgccacccgggagctgctcagcccctacagccccgtcctcaagttcttcatggtcaagtccgtcatctttctttccttctggcaaggcatgctcctggccatcctggagaagtgtggggccatccccaaaatccactcggcccgcgtgtcggtgggcgagggcaccgtggctgccggctaccaggacttcatcatctgtgtggagatgttctttgcagccctggccctgcggcacgccttcacctacaaggtctatgctgacaagaggctggacgcacaaggtatgagccagggtcctaggcgacccccgctgggagaagcagggagccccaaacatcccaggaccctcccacctcccagcatcctacaggtgcggctgggtcaggacatgggatccccactctatatgcaggaatggggccacagaggtcggggaagagcaggtgccaccagcacgaccgattcggtcctggaagctcaggccacctgtcccttgcagcaggtccaagtgtggcggtccagggctgatacagacagagactgtaatgaatagacaaattccctcgggcttctaactcccaacactgtggttaccattttgtcctgtaattccctcatctcatatgctattttttaaaaaaaggatacttctggccgggcacggtggctcacgcctataatcccagcactttgggaggccgaggcgggtggatcacaaggtcaggagatcgagaccatcctggctaacacggtgaaaccctgtctctactaaaaatacaaaaaattagccgggcgtggtggcgggtgcttgtagtccgagctactcgggaggctgaggcaggagaatggtgtgaatccaggaggcggagcttgcagtgagcgagattgtgccattgcactccagcctgggtgacagagcaagactccgtctc

SEQ ID NO: 612 - DNA, 1490 bp, Homo sapiens
cattgatcaacacttgtcatcaacattatttattttattattaaaacatatgaggttgggaagagccattccaagtaaatacaaatattctaaaatatacatcttccaagattcagcacttcttacattcatcacagtaactgtttccacagcagggaatcacaacagcatcagtcataatatccttgcagatgagacacaacaattcatctgggataggatcatcttcttctgaggaagaagatggctcctctggtaagaagggaggtttctctttcttcccaattgcatatgcttctcttaggtgtgttatttgtgttgcaagttgctccatagacatcaccacgattccagaaataagtatcaatttgcttatgccccattgttcccaatttgtgaaagaggagtctcccagcatctatagttggtattgcatattttccagtgttggtaagcattgcacctttcatattaaggatctttcacttccatcatgaaacttctgggaaatccagtgctccttttaatcctaggaccagattcaaagtttttatccccatttgttgggcaattcttaatataatgtccaggtttaccacaacggaaacacgtgtaagatggaggtggtggacctagaggtttcttcatgtaattgattgggtcgtattcatggccagattgcgacatcattgctttaattttatcttcttcagaagcattggcttcagccagattggcagtctttgtaagctgggccagagaaatagacgcggaagagtcatcaattgcttttgtagttgccatcgctggttcagttcgacttataacatatgtcttgcttgtagatttaacacctccaataggaattcttctaacaattacagaagaattcttaggaatcagagcattatcatcagtatattcttctttcgtctgcgcattggtgatctgcaggtcgcagtcggcagctttcagcttctctctccccataatctgcttctttaagtcgcagagggagatgtggagcccatcaaaggtgacggtatcatagttgagtttagaggaaaatttataatgcacacaggacatggtgccaagggattcctaaggttcagcgaggagacgtggacactctcaatatacgtatatttataaactttaagagcaaaatatgtacacacaaaacactcaaagacaccgaaggaccctaaggcctcagattaaataccccccaaccacaagcaggggttcgtcagaacaataatccagagaccccccgatactcagaatcacttcatgggggaggaggaggacgaggacggggaagaggggaaatcgagaatccgccaacgggcacaatgtcacccggctgggtccccctcgctcatgctaaggggccggcagagacggggggattggcggtgcagtcagtagcggtcagtccacacgttaagagtccgagcgaccccacggggtcaggggtccatagc

SEQ ID NO: 613 - DNA, 2078 bp, Homo sapiens
tgacagcccccagggcaggtgagccctgcatctggaataaggatccagaggtctcgttcaggaccatggagagcggcaccagcagccctcagcctccacagttagatcccctggatgcgtttccccagaagggcttggagcctggggacatcgcggtgctagttctgtacttcctctttgtcctggctgttggactatggtccacagtgaagaccaaaagagacacagtgaaaggctacttcctggctggaggggacatggtgtggtggccagtgggtgcatccttgtttgccagcaatgttggaagtggacatttcattggcctggcagggtcaggtgctgctacgggcatttctgtatcagcttatgaacttaatggcttgttttctgtgctgatgttggcctggatcttcctacccatctacattgctggtcaggtagacatgtatgcaggtgccatcttcatccagcagtctttgcacctggatctgtacctggccatagttgggctactggccatcactgctgtatacacggttgctggtggcctggctgctgtgatctacacggatgccctgcagacgctgatcatgcttataggagcgctcaccttgatgggctacagtttcgccgcggttggtgggatggaaggactgaaggagaagtactttttggccctggctagcaacggagtgagaacagcagctgcgggctgccccgggaagatgccttccatattttccgagatccgctgacatctgatctcccgtggccgggggtcctatttggaatgtccatcccatccctctggtactggtgcacggatcaggtgattgtccagcggactctggctgccaagaacctgtcccatgccaaaggaggtgctctgatggctgcatacctgaaggtgctgcccctcttcataatggtgttccctgggatggtcagccgcatcctcttcccagatcaagtggcctgtgcagatccagagatctgccagaagatctgcagcaacccctcaggctgttcggacatcgcgtatcccaaactcgtgctggaactcctgcccacagggctccgtgggctgatgatggctgtgatggtggcggctctcatgtcctccctcacctccatctttaacagtgccagcaccatcttcaccatggacctctggaatcacctccggcctcgggcatctgagaaggagctcatgattgtgggcagggtgtttgtgctgctgctggtcctggtctccatcctctggatccctgtggtccaggccagccagggcggccagctcttcatctatatccagtccatcagctcctacctgcagccgcctgtggcggtggtcttcatcatgggatgtttctggaagaggaccaatgaaaagggtgccttctggggcctgatctcgggcctgctcctgggcttggttaggctggtcctggactttatttacgtgcagcctcgatgcgaccagccagatgagcgcccggtcctggtgaagagcattcactacctctacttctccatgatcctgtccacggtcaccctcatcactgtctccaccgtgagctggttcacagagccaccctccaaggagatggtcagccacctgacctggttttctcgtcacgaccccgtggtccagaaggaacaagcaccaccagcagctcccttgtctcttaccctctctcagaacgggatgccagaggccagcagcagcagcagcgtccagttcgagatggttcaagaaaacacgtctaaaacccacagctgtgacatgaccccaaagcagtccaaagtggtgaaggccatcctgtggctctgtggaatacaggagaagggcaaggaagagctcccggccagagcagaagccatcatagtttccctggaagaaaaccccttggtgaagaccctcctggacgtcaacctcattttctgcgtgagctgcgccatctttatctggggctattttgcttagtgtggggtgaacccaggggtccaaactctgtttctcttcagtgctccatttttttaatgaaagaaaaaataataaagcttttgtttaccac

SEQ ID NO: 614 - DNA, 1475 bp, Homo sapiens
ccgttttcctcggtggcccaatagctcgtgtatctaagttgaacccggcagtatgcatgattgcctttttctcttctttttaaaaaaacccaactcagatgctgcttgcgtggcttttaatgaagctgaatggtatctatcacttatttatccttgacaggttatcttccccactcttcctttttctaacttctccattcttctcattcttgacactttcattagaactatatggtttacgaagtattttcacttaactattttatttcttctctataactggtcctgtgaggtcacattacaaaagaagaaactgagggtctctgaggttaagtagctttactaaattataaggaaacctagctggtaggtagacagcaagaatccaggtcttctgactcctctttcagttctctttccacttagaccatagctgcttccttttcttattttttagcttccatctaaccattgcctatcttgcctgtcctaatgttctccatcttctctcacccctaatcccactcactgcttctctaccactttgctttttggtggatgctagcaatgtgctttgagagtcagtcctattttggttctctttctagttggtttgtacatcattatttctcctgaattgcaattaaactccttcctgggagatttgataatgactgtaaatcaataaggtactgtgatcaccagcctacttccaatctccacccacctccctgtctcttcccataatcctacgaaagacccagactagatgtctgtttctctggaagctttatctggcatgatgttgcttattaaagggcttagaagagttctcaagggctattaatatcactttagaaaccccatctgttgtcttggtgctggatatttcccatgtctgatcctcaataacacaattcactaaaggccaagcttggctcaatctgattttcccattcttactacttcacagccatgaatgtgattgctcaatccagttggccctgagagcaccttgccctgctgaccttcactgtcacctcggtcttgaatcagagccccaacccaaacactccctgcctgtccctaccccagcctttattctcaccacttgtttaacggcatgaccttttagtttctccattcccagacacccacacacccagacttccttctgagttgcaggtttctccttagatgtccaactagaaatattactaggaaagttacttttcaaagcaggaatgtgctgggaagtaggagacagcaactccctcctctctccccaaaattattggatcaaaaaagaaattccatccatctcagaatctgtgagtcctcctcacataaatctgagggaaaaggctgtgtcactgcatctttgcaggaagaaagagaagcaagagctagacacacttcagaatatatcttagtttcccctttcccagtttaacatgaaaacgaaaccttagaaa

SEQ ID NO: 615 - DNA, 2054 bp, Homo sapiens
ccacatgtcaaaccctgacagttttactgttcaccaaaatgccacatagctaattcatgatttataaagaaagctcagcacattaatagattagatagtagaatgaataataaatggcaaagctatgtatacaaagaaaatatgcatagctcttggaaaatcatataatgagggttggtccatctggagccttttcttcctaggggaaatgtaaggatcgagtgataatccttcagttataaaagaagaaaatgaagttccatatgggtatttgatcaagcccaggaaattgcagtgctgaggaaattctagaacaattaaggctcttccgcacttaacccagtaggcagcccgattggatccatggcagcagaatgctattgaaaatgttagtgtggagtgggtaggaatttgatcatgatcctttccatccctagcagccagagccatcaaagtcttattttaagtctcttgattctaaaaatcacttcagagctgtccttagttctccctgcttcccgacttgcttctgcctggcctggccacagaaacgcggcatggtcagtggggtctttgcccggccctgaagtcctgttagagttctcctggtcccggctctgactctccacagtggcttcttcggcagtttactcactgggcgtttccaatctcgcctgcggcagcattgccctcccctgcagccccctgccttcagcactgtaggaaaacccatcagaagaccaccttgacagtgtggtcagtcaaccaaatgtcttttctccatccttcctctccttctggacataataacatctgttgagtgcattccatttgccagacactgttgcaaatatttgatgcattttatctcatttaatctttgccagaaaccatgaggacaatattatttttatccctaatttttgtggtgaggaaactgaggcacaggaacatgttgattatctttgcctttttgaaactcagcttattttttgctttccataccagttcatttcagtgaacatttatgacctactgtatttccgttataaagatgagcaatgcaggattccttccctcttggagcgtacagtggaggagatgaaaaattccactgtgacaagcaagggaggactgaggtgggcacaggcagcaatgaaaggtcattgtccattctgagggatagagaccacttcctgagggaggtggtggcagagctgccttggaggcaaaaatataaaaaataggcaggtgcggtggtgcacatttgtagtcccagctactcaggaggctgaggtgagaggattgattgagcttgggaggtcgaggcagcagtgagccatgattgcaccactgcactccagtttagatgacagaatgagaccttgtctcaaaaaaaaaaaaaaaaaaaaaaaaaaaaagggctcttccaaccttgacattcccaggaggagccccgcttcaccccttctcactctggaaaccgcacctttaactttgcagaccttccttcacccctgacttctgcttcacctttgacctctgccccccatgaatcccattttacctctagacctataagttctggtttatgtttgacccctccctctgagctgcacttcaccgctgaccttgcctcacctttaaccccccacctgagccccagctcctacctctgaccccaacttctctttgatctctgaatcccctctgactccaacttctctttcaccctctatgagtcccattttacttctacacctgcaagtcctggtttatattggacccctccctccgagctgcagttcacctttgaccttgcctcacctttcaccccccacccccccacagcgtcagctcctacctctgaccccagcttctctctggttcccacaggccccatgcatcctccctgcctcactcccctcagcccctgccgaccttagcttatctgggagagaaacaaggcctggtgcctgtgaggaagagaggtcacccctaccctccctccccgcttccctgcctcaccctcaataaataaattaattgttgtc

SEQ ID NO: 616 - DNA, 1711 bp, Homo sapiens
cctgatgacctgctgggggagcatcttcactgtggccctgtgcctgcaggtagctggggtggatgagggctggggggtccaggccgggctgacttccacctcacccccgccccgtccacggcagagctccttcccctggacactctacctggccatggcctgcatctttgccttcatcctcagctttggcattggccctggtgagtgggcccaaggggctctgggcatccgtcatcacatagaaggagtgatgggtgcctgggtgcacagtgggtgggtgtgaatgcaatgtcccctgcaggccctcagagaccacctcatgccggggcttctgggagggaatggcaggaggagagcactgaggggccccccatacagactgggcctgggctcccactcccatgtctgggctggggtcggggagaggcaggcagggaaccctggccagcagccccctgtccctgcccctccttctagccggagtgacggggatcctggccacagagctgtttgaccagatggccaggcctgctgcctgcatggtctgcggggcgctcatgtggatcatgctcatcctggtcggcctgggatttccctttatcatggtaggcccgcccctcccgctgggggccctgccttaggctgtgtccctgtcatcctgagaaccccagggggaggcttccatccagggagactgagactgaaagggaggggtcttaggggagcaaagaggggggcaaatgcctcctcacgacctgtcatgggccttctgtttaggggttgatggagacacaccaggtcttggggtcttttttaatccgcaggaggccttgtcccacttcctctatgtccctttccttggtgtctgtgtctgtggggccatctacactggcctgttccttcctgagaccaaaggcaagaccttccaagagatctccaaggaattacacagactcaacttccccaggcgggcccagggccccacgtggaggagcctggaggttatccagtcaacagaactctagtcccaaaggggtggccagagccaaagccagctactgtcctgtcctctgcttcctgccagggccctggtcctcactccctcctgcattcctcatttaaggagtgtttattgagcaccctttgtgtgcagacatggctccaggtgcttagcaatcaatggtgagcgtggtattccaggctaaaggtaattaactgacagaaaatcagtacaacataattacaggctggttgtggcagctcatgactgtaatcccagcactttgggaggccaaggtgggaggatcaattgaggccagagtttgaaaccagcctaggtaacatagtgagaccccctatctctacaaaaaattttaaacattagctgggcatggtggtatgtgctaacagctctagctactcaggaggctgaggcagcaggatcacttgagtccaagagttcaaggtagcagtaagctacaatcacaccactgcatgccagactgggtgacagagggagacttcatctctttaaaacataataataataattacagactcaggaaatgcagtgaaagaaaaatacaggttggccaggtgaggtggctgatgcctgtaatcccagcactttgggaggccaagatgggaagattgctttgagaccagaagtttgagaccagcctgggccacatagtaagatcctgtttctacc

SEQ ID NO: 617 - DNA, 2700 bp, Homo sapiens
tttccaccaaggcgaggagccctgggctcctgacagcttaggcgggccctggctgcgacacgcagcccctcgcctctgcttccttagcctctgagggcttcagacctgccgcgcttgcagccacaccatctccaacggatgctcactagcaggaaattggggccaaattcacaggcactttccagaaactcccccactggccagaggttgcaaacatccggattggctctgggcacagtggccgccttaagtcctcctgaacaccccttctgcaagtaccccagggcggtctcctgacccagagatggatttaccagtgaacctaacctccttttccctctccacctcctcccctttggagaccaaccacagcctcggcaaagacgacctgcgccccagctcgcccctgctctcggtcttcggagtgcttattctcaccttgctgggctttctggtggcggcgacgttcgcctggaacctgctggtgctggcgaccatcctccgtgtacgcaccttccaccgcgtgccccacaacctggtggcatccatggccgtctcggatgtcctggtggccgcgctggtcatgccgctgagcctggtgcacgagctgtccgggcgccgctggcagctaggtcggaggctgtgccagctttggatcgcgtgcgacgtgctttgctgcacggccagcatctggaacgtgacggccatagccctggaccgctactggtccatcacgcgccacatggaatacacgctccgcacccgcaagtgcgtctccaacgtcatgatcgcgctcacctgggcactctccgctgtcatctctctggccccgctgctttttggctggggagagacgtactctgagggcagcgaggagtgccaggtaagccgcgagccttcctacgccgtgttctccaccgtaggcgccttctacctgccgctctgtgtggtgctcttcgtgtactggaagatctacaaggctgccaagttccgcgtgggctccaggaagaccaatagcgtctcacccatatccgaagctgtggaggtgaaggactctgccaaacagccccagatggtgttcacggtccgccacgccaccgtcaccttccagccagaaggggacacgtggcgggagcagaaggagcagcgggccgccctcatggtgggcatcctcattggcgtgttcgtgctctgctggatccccttctttctcaccgagctcatcagtcccctctgctcctgtgacatccccgccatctggaaaagcatcttcctgtggcttggctactccaactccttctttaaccccctgatctatacggctttcaacaagaactacaacagcgccttcaagaacttcttttctaggcaacactgagggagaggaccaggattgaaaaaagtttcttcccataattcagtggaattcccagttcatccatttcccatccccacccaacagccatgtggacgggatgaatcctcaccattctccagggtcatcttcagaactgcactggccgcttttccacctcctcagtaggaatatgactcctcatagagttttggtgacatgatgtatctaacttatctactatccctttctctgtgctgacagtcatggtctttgcccgcaaagtgtcctttcctccccaaattcactctggcatggtgatcgacattgtcttaaagaagtcaaggcaaataagaaggaggaggtaaaacaatatgggcaggttgagattgaatagaaaagaatgaacaagtcatgatgtagacctctgagggtaggagaccatagttccaggctttctggcacagtccccatttcaaatattctcctctgtggtcctagtacatatatcctaataccgatggggtatgacccaagagttgaccacaaaacactgtctccaaatatattaaagtatatagtcctatccatgagagcagggaatcttagctttaaggttttgtttgtggcaaccacacacgaacatacacacacacacacacacaactatgaaagaggcaggtgttctagctagctagtttactccaaaatgcaatccgttgacatgaaacaggcactgagggtaactacttcctttcattttgaagcaacagtttataaacaggaaagtctactggtttcatagaatctgtcagatttgcttatttgctactggtttcacgcgcgtggactatattccagtgtttctagtcaaagacctttatcctcaaatcatgagattagagtaaaacaattgctgtaaggttgagcatttcatgaccaatgactatgaaggcacattcaccaaacacaggcactttaagggcatccttgattaatttgctaattgctattttttgttggtatgtgaattcctgctaggaggccgaggctagtaggcaatgaaaaagacagaacaatggtaaaatgcagccccggtcctctacaaattgacagtataatttatgaggtgaggcagttaagtgatgatgcagcatttggatgatcatgtaaaaccagtgtcattacacaaaacttaaaaaaaaatcctaggcaataaaactgcctgtggtctgctatgtctctgactcttcaaatgcatgaattaaagaatgatataataatctctgaattattgtaattcatgtagtatattgtatataataaattatatcaattaagagttc

SEQ ID NO: 618 - DNA, 1518 bp, Homo sapiens
aaatggtctttcctaccttcttcactgcttcttttcagtggtatgaatttaaaaccaggtactatgatagcttacctgatttttggttctcatgaaggtgatttttgtgtggatggttgttcaatttggtgttcttgtggggaggatgatcacagtagacttctatttggccaccttgttatgcttgcctcctgtaattcctgtttcagtttattcatcctgaaattaagaagtagaagagaagaatggcagatagtggctttcctagaggaaaattttatatgacgtttcagaacattatttttattgttatgaaggaaatttagtacttgtaaaaattatcatactgaacagttttagatcaaacctaggtacaactacggtatgatctaagatgacatatagatctttcccattgtacttttccaatgcaaaccacacctctttcctgtctttatttttgtttctacattttcctttcccttttatttcccgtttccaggcttctccctatcttctctttttcctttagtctgttctacacaaatgtgtgcttagcagaaaattacaacctatactggagaaggaaacaatctaaatctttatatctttcaaaaatttaccccacataatattattcatgatcatgatgaaattttcaaatggttttgttttacttcaaaaaggaaactcaagaaaagaagcaaactcttaattaattgctgtaattcccatatttgcctacgtgtatatgttcctgttatccttttaaattaaacacatgaatatgtgaattacactcaaagtattcttctctgtaaaaattacagtagtcataactatttataaatgataacctgaagcccagttacttcatagtcctttaaattccatttgataaggcatgttgtgtattgtttagtccttgctcgcttcatttgttcatcagccattcatccaaaaaaattttgaggatctgccatacgttatgttctgtttgggctgggctaagacaatgaataaaatgagattcctgaagtggaattcacagtccaattagagaaactggtgtgcagatgaaccgataagttatactgtagtgtggtaagtattacagttgaggtgcaagaaaactgccctgggaatcttaaatttgcctgttaagatcaacatttgagaatgttttacattggaagcaattttgtttttcaagaatgaagagggatttgtggcctgttgcagtggcacatgcctgtaatcccaacactttgagattccaaggcgggtggatcacttgaggtcaggagtttgagaccagcatggccaacatggtggtgaaaccccatctctactaaacacaaaaaaaattagccgggtgtgctggcacatgcctgtgataccagctacttgggaggctgaggcacgagaatcgctggaccctgggaggtggaggttgcagtgagccgagatcgcatcactgcactccagcctggttgacagagcaagacactgtctctg

SEQ ID NO: 619 - DNA, 1404 bp, Homo sapiens
  misc_feature 448: n = a,t,g, or c
cacggccggtgcctgagccctgcggagtctccagagcacccgaggcccggccttcccccatgtcgggctcgctcgcccctctaggcacgctgcacctggtggacctggcgggatccgaacgcgcacggaaggcaggggcggccggcccgccgcggggagacccagacggcgcccggcgcctgcgggaggcccagaccataaaccgctcgctgctggcgctaggaggcgtgatggccgcactgcgggcccaccggccgcacgtgcccttccgcgactcgcagctcacgcgactgctgcagccggcgctgggcccaggcaccaccgcggtgctgctgctgcgggtgggcgccggggcggggcaggtgtgtgcgtgccggtcgccgcccacccgggcccgcccacccgcgctcttgcccgcagatctccacgcggccgcaggatctcgggnagacagtctgctccctcaagttcgccgaccgagtgggtcaagtggagctggggccagcccggcgccgcagggtcccgcgctcctccgggacgccttcttccctcagcaccgacactccgctcaccgggaccccctgcacccatacgccgtcccctggcagtcctccatgccccagtcccgacaacggctcgggctcggctctcgcgcccgcagagggcctgcccctctagtcctgggtcgcggccctgcccatggggtctcaggccaggtctctgctggcagaggcggtagtaaagtccctctaccccgtctcccagggcacaagctccctagcctctttggatccattgcccctgagctcccagagtcacccctccacctccgcagccagtgaagtgtgttgtgcctgctgaagtgatcaccccccgcccccagccctgcatcaggccacaggtcttggctttctccttatcaccatttgctgttatcacggcacacagcagggaatcccaggcccccccgccaagtggttacccaagtcaccactcctgacccaaaaatcaggcatggcattaaaacgttgcaaattcctttactgttatcccccccaccaccaggaccatgtagggtgcagtctttactccctaacccgtttcccgaaaaaggtgctacctcctttccagacagatgagagagggcaggacttcaggctggatccaccactgggctctccctcccccagcctggagcacgggaggggaggtgacggctggtgactgatggatgggtagtgggctgagaagaggggactaggaagggctattccaggctcagccctgctcctgcagctttgccgctgagtgtaggaaaaacaggcatgacagaccagggtgagggttgtgcccagctgggccacggccatgcgtggggtggcccaataaacaccgtggactccc

SEQ ID NO: 620 - DNA, 2151 bp, Homo sapiens
cttttctttctttattttttaaaaattgagacagcagcttgctctgttgtccaggctggtcttgaactcctgggctcaggcagttcctctcaccttggcctgcagtgctgagatgacaggtgtgaaccactacacctggcctgcttacagattataaaaagaaaataagtttacaagttaaagacagataaaatgacaaaatcagtaaaattaaaattacttttatggagccgatgatgtttattccagttgctccgctcattgtgaatatggtattgttgctgcggcagatttggaggccgtggcagatttggaggctttggcaatggcttctgttaccttgccatgaggtaactcagttccctcatcacttttctctgagaactataaaaccttggaggggtgccttctgcccttcgcttggcatgtatattatgcagggatcaggtcttactccgttcttgattgttagtacaaattagttaaaatcgtattgtttggccttagcctgatggtaaacacaacagcacacgtgggctgtgaaatctctgggcagctctgtgtttctagggaagcatctcgatgatccagaacaggcttatactaatgttttagtgtaattttgaaatgaaaacacagcatttaaaaattcttatagagaatgtatagaccttgagaagtgttagcagacccagtttacgacatgtctcaatattatgaaacattgctttattccctatcctgcttgtacatttaattttttcatccagttttaaacaacttgggtactgtggcctgtgcctgtattcccagctactagggaggctgaggcaggaggattgcttgagcacaggactttgagggctgtagtgagctgtgattgtgcctgtgaatagccattgtgctccagcctgggcaacatagcaagaccctgataccttgggtttttaaaaaacaaaacaagatacatgctgacatttctggtttggcaggcagagcttgttctgctccccaccctcccttttcccatagtaaccatttataggacatctcactgttgtctactctgtgttgcctctgcttccctgcctggtagatctaggaatcttaggatttcttagttttagctggtgatccgtatctttttcttaattccattgtaacttcagcttttcttattgcttgtaggaaggctgtttccattgaatacaaacaaaataaaagcttttattcttaatcttagagataggatgtttgtatttaaaaataattgtgctgtcaaaattctgtcaagttggcttttaccacattagttttttttaatgtggtttatatgaccctggagtaccttgtcttctcactgttaaattctcaactgagttgtccctatttaaagtgtgagactgtgccagtttgattttaaaatattgcaagtgcgttatggcaagataaaactgcaaagaaagaaccttcatgtccctttgattataaatgcttttggcacttgtttctactttttcctaatgttttttgaggaaagaacctccaactctccagacaggtctgggggcaaatgactaaaacatgaactgaggccctgggctgtctctgtgaggatatcccctctattctctctgaaatgtcccagcatgtggtgcatttcttgttagtgtggactcctctgtatataacacatcttatttatcttctgtgcataacatgaagtagtgccctaatgcaattccaggatgtaattcagcatttctataaaaatacagtgtttttctacatttgcatcaaaaaataaccagataattatatttattaagaaaatagcatttttggctgggtgtggtagctcacgtaatcccagcactttgggaggccgaggcaggcagatcacttgaggtcaggagtgaggcaggcagatcacttgagatcaggagttcgagaccagcctggccaacatggtgaaaccccatctctactaaaaatgcaaaattagcctggcgtagtggtgcatgcctgtaatcctagctactcaggagactgaggcaggagaatcacttgaacttgggaaggggagattgcagtgagctgagattgtgccactgcactccagcctaggcaacagagtgagactctgtttcc

SEQ ID NO: 621 - DNA, 1611 bp, Homo sapiens
acaaagtgttgttttcagaggaagtataattaccaaaatggaatgaaccatgtttttaccaaaacttgccttcttcttgtgtcttcttatctccaaaaaggtcaacattgcccagctaccaaagcccaactcagggggtaattcctacaacttattctccttcaacctccacattccaatcactgagtcttgtcaatttcacttcacagagtctcttaattccatcttctctcctcagttgcctttgcgattgcctcgatctggccctgattacatttcctgtggaccactgcagttacgtccaagtggtctcatcttatctttcttcttatttgttcttcagttgatgactagagtgattttaaaagttatacagatctgatcagattaatatcaaggttatatccttctattgataaagatgttagtgttgcttaattcttcaaggtcattgagagcagtgttctagcaagtgtcaataactgatggaagggagaaagagaagagggctgcacatgcctgcaggcgtgtttgaaatgactgaatttccattttgtgcaagtgctagagggtggtatggagaagtaaagggcaaagattgatcttgattctgagcatttgaaaaagtgagataaaaggaacatgaggtaaagattggaaagagaagagagaagagtaaaattagaatcataacttttgtttctaatgagttggcaagcaatggaatttttgcattaatgtgaaggaaattagttttataaattccagaagtatctataacagttccctaaaaagatgaaaagaccctagatgatattgtaaaggaggagaaaaaaatgtaaaacagagaatgaagttattgtgcttttttgagtttcaagagaataccaaaaaaagttacaaaaattttttcgcagttgctctgcatgtgtgtgtgtatgtgtgtgtatttaatatgaagagaatcaccaccattttcatgagcctataatagcagtttctgacatctgcaaagcatcctgaaataagaacagtgcagacctggttggaggcataaatctgtggaatatggattaggtttgcctcttattttattttatgagacagagtctgctctgtcacccaggctggagtgcaatggcatgatctcagctcactgcaacctctgcctcctgtgttcaagtgactctcctgcctcagcttcccaagaagttgggactgcaggcgtgcaccaccatgcctagctaatttttgtatttttctttaatagagacaggatttcactatatgttggccagtctggtctggaactcctgacctcaggtgatctgcccgcctcagcctcccaaagtgctgggattataggcgtgagccaccgtggctggcctaggtttgccttttaaatggttaagtctggtacatcctctatttgaagcaagggaattaaaaatagagaaagaaggtggtggattgttcctgtaatcccagctatttgggaggctgaggcaggaggatcatttgagcccaggagtttgaggctgcaatgagctatgattgcattactgcactccaacctgagcagcagagtgagaccctgtctttaaaaaaaag

SEQ ID NO: 622 - DNA, 4298 bp, Homo sapiens
ggttggagcgagcatgtgggtctgcagtaccctgtggcgggtgcgaacccccgcccggcagtggcgggggctgctcccagcttctggctgtcacggacctgccgcctcctcctactccgcatccgccgagcctgcccgggtccgggcgcttgtctatgggcaccacggggatccagccaaggtcgtcgaaggtataaccagggaattgttccagaggtttccttggatattcctacaactgataacagctgtcatttcttcagcatctactgtgtagactcaagaacctggagctagctgctgtgagaggatcagatgtccgtgtgaagatgctggcggcccctatcaatccatctgacataaatatgatccaaggaaactacggattccttcctgaactgcctgctgttggagggaacgaaggtgttgcacaggtggtagcggtgggcagcaatgtgaccgggctgaagccaggagactgggtgattccagcaaatgctggtttaggaacctggcggaccgaggctgtgttcagcgaggaagcactgatccaagttccgagtgacatccctcttcagagcgctgccaccctgggtgtcaatccctgcacagcctacaggatgttgatggacttcgagcaactgcagccaggggattctgtcatccagaatgcatccaacagcggagtggggcaagcagtcatccagatcgccgcagccctgggcctaagaaccatcaatgtggtccgagacagacctgatatccagaagctgagtgacagactgaagagtctgggggctgagcatgtcatcacagaagaggagctaagaaggcccgaaatgaaaaacttctttaaggacatgccccagccacggcttgctctcaactgtgttggtgggaaaagctccacagagctgctgcggcagttagcgtaagtcccttgggcctgcaggtccagctcgccagagctctccaggtctttagctgggaggaccatcaagtgactgagtcccatcgccagttcgagccaagtccaggtcagcacaatgttgagtggaaactaggaccaaagtcatccagctatttgggcactggtttctcagccttcccctttgcagatgaccaaaattttggcctatccagctttatttttccaagggaccccagaagtagactgctaagctgcctgccatagaggaatagtcaaggatttataacctagggatgtctgaaaaagtcacttagtcctaacttatttaacctttcaaaatttgtattagcttttaaaatagattctaattttaaaggtaacattatgcttattacaaaacattttgaaaacatgtaaaagtgcaaaggaaaacttaagcataaaagtttcctgttggctgggcactgtggctcatgcctataatcccagtaatttgggaggccaaggaggaagcatcacttgaggccaggagttcgagaccagcctgggtaacatagtgagaccccatcactacaaaaaaaaaaattaattttttttttaagttacctggccaggcatagtggttcatgcttgtaatcccaacaagacaggcagatcacttgaggccaggagtttaagaccagcctggccaacatggcaaaactccatctctactaaaaatacaaaaagactagccaggtgtggtggcaggcacctgtaatcccagctacttgggaggctgagtcacgagaatcatttgaatccaggaggtggaggttgcagtgagccgagatcacaccactctactccagcctgggtgacaaagggagattccatctcaaaaaaaaaaaaaaaaaaaaaaaaagccgcctttttttttttttttttttttttttttttagacacatgctttctctgtgaaaattccataaatgacaaaacagaatgagcatagtaggggccctactaaaattttttttgtgtatttcaccaaggcaaacacatataacagaaaatatatactttgcgcccttgactttcacagatttaacattctccattttgattactcatgaagcccatgacatacccatctataattttcttcaataatgaatgtgaatcatgaatctatagctcagtggagctctgtaaaactctatcgtggttccagatatatcaatgtgcattgaaatgataagtggaaaaaacagagctactaaaacaaaactatttgctagtgtttgaaaacaaaagtgaagaggaataagaaagttatagttgatggcaagaaaatcaaaggtttcaatgaattatatcctggtttaaatctataacatgaaaaagtcaaatacagtgaaacactccgtaagttaaaaatagaaaaaatatgatttatggaactacttaattttgagtgtagcaaccagccactatgagaaccaaagcaactattttctttttcaacttgcacttacttattgtgacttgaagataaagttacatatacctaacagtgaaaatatcattgaagagaatgataaaatcagacacaacattttcttgcaagtaacgtgtgatataagcacttctgcagcaaaggactaagctctgtagcaagtaaagtctggtttcagcgttaagaagtgtatttcatagcataatgtacaataacaggcagaagtggccaaccacattgtcacagatgtctctgcctaaactaaggaagctcctagaaaagttgggtatgcaggagcaaatgacactagaatatgattagaaaatgtgtttgtgaacgtacatatacaaagggaagacagcaccagggtttaaccccgtgactttacatcaagcatactctacccttccaaaccaggaccccaaggcaagcatgagaagttacagcacgcattttggaagtcagtaacaaccttcaggtcacagtggccttgaacaagttcctaagagatccttgttagggtcagtagtcgactgtgtgcatttgctttcatacagtaattcttggtgaaaggaaaaaaaaaacaacaacaatactttttaatcgcagggacacttactcatttaaaaaacactttgaaaattgctcatctcttagactttgatgtgggttcgaagaggggacaaagaaatccagtaaggtagataatatataccttccactcagttgtattctgtctgcaagtttggaaagctgatctggaagtcttctttgtttgattactccctcaggtgtgacagagacctcacatagtgaatattgatccggggtggcagtaacagcaaactccctgatagcctgaatgaccacttcctttgctgtagtgtccttactgatcatgatgtagcggctttgctgatcagccttaaaaacccttagcacttgatctggcaagtcaggagtagcactgaagtctaaaatgcgatgatgtgactgcaataaatcaggattactggatgataaggttccactgacaggcaatgcagttgggatgtgctttgtctgccttaatcctactatgctgtcatcttgagactgaccaatcccaatatcactgaacaaagaggaaaattagaaaattatcaacaagttaaaaagttgtacatcatcactatataataaacacagaccaaaaaccatattccattttttttttgcagctcatgtaaaaacaccattaataaatttggttgaaaactgcaaaagcaactactgcttaagtgtatccaactcattttcctgtttttgttttttgtttttgtttgtttgtttttagatatagcatcttgctttgttgctcaagctgggcttgaaactcttggcctcaagtgatcctcctgctgtggcctcccaaagtgctaggattacaggcatgagtcacagcacccagcctcattttgctgtttcttaagtgtatagtatgtttctctaaaacctatggtttttctttcttttttttttttttttttttttttgagatggagtctcactctgtcacccaggctggagtgcagtggtgtgatctcggctcactgcaagctccatctcccaggttcatgccattctcctgcctcagcctcctgagtagctgggactacaggcgtccgccaccatgcccggctaatttttttgtattttgagtagagatggggtttcaccatgttagccaggatggtctcgatctcctgaccttgtgatccgcctgtcttggcctcccaaagtgctaggattacaggcgtgagccaccacgcccggccaaacctatggtttttctaagtagataagccataaaaaatattagtagtgaaa

SEQ ID NO: 623 - DNA, 1630 bp, Homo sapiens
cttctggagcagacagagcctgccagtgcctgtggagtcagccagccgagggtctgcctcctcagctgccccaggggggcctccctcctgaggctcaagctcctggcgtctttcttcctgttgctggattctcacctccatgggcctgtctcttctgcctctgccttctggacaccgtttcctctccgctgcttcagagagctttgcctcgcctccgcctgcgctcccctccagggtccttctgctggctgcggactcggcccaccactgctgtctgacgcttttcttcctgccccctctgaggcctggctctgttttagggagatcactgggcccaggcctcagccccagttctacctggcttgctgtcaccgctctaggggtgggggacgtcccaggggatccccaggagaaggagagccctgtagggggctgtgcagatgtgggtgtgccacagggagggtggcccctagccatgtatccattggctgttttggcttcagattcaaccaagatctgcctgactaaaagaagccacctcagcgcagtggaacggggcccagggggaggcaggagaggagggttccggtcccatgtcaccttctcatttgctgtgtgactttggcccactcacattctctttgggcctcagttttatcatttatacaaggagggcttttctagctgtaacaatctgtgaggattgagaggataggctggtgctttgaagaaaggccttgtaagtgacaagacagtcccctgggaagaaagagaaaggaaatgggctattgccaaaggacaggtggcgttagatggctgtgagggtgacctggtgagggaagggttggaatgagctgctgcaggaggccaagggatgcctgggctgggctgggctgggctggcttaggctcaggattgcctggggacagtaggagcatggcaggagctggggcaggtgcatagcagtgcagtgggaagggacagaggagatcttagaattttgaggaaaatctgggacttgagacctggattctaacagaccaactgcatgtgtgtctgtaggtctcagtttccacattcatacagtgagggtgttaagtcaggtagctggagacttcccatcgcctctgacacttttggaggtgatatgatacagcccccgaccaaaccaggctttgtggggggtgagagaatacagacacaagtggcaggattcagatggaagcttcgcaaggctgggggccgaggaccacccacttctctttcccagccctagttctgggttccccagtggggcaaggggtggtggaggcagtgcccatgctgggctgagcctgcagtttttgtgagctctgggcttgtctccatgggaacaggggtgccttcttagtgagctcatttcacacagatcgagggggtatgcgtgggggagttgtgagtgagctcagctccttcaggcctggcctctcccagaacagagtgaagcccctgccctggacccctgctcccttctacccttgagggccaccaatggaagagcccgcccttcattctgcagctcctgcggccaggctgagctctgcccccaactttgttttctctcatgttctcaatacactctgcctcaaat

SEQ ID NO: 624 - DNA, 1427 bp, Homo sapiens
  misc_feature 1029: n = a,t,g, or c
cagtaaagcttgaaggcaaatgatcagtttttaattaccaggtttatttaagtgggtaggggaggatcatgggcattaagttagtgatgatgaatagtagatttaatgtagtaggatttgtaattattttccttgggtcaggaaatttattttggggaactaattctagcaggtaaactttgtttctccttcctttaagtatcttacccaaatccttgagcagtgcttctgtggaaaatgagctggttgctactgtgtagtagtgaggtctgccataaagactacttcttaaaatagtatcctagtatgtactttcatcacctcagttgtcttgggcctaagtacccatttattttccaaaggaatggacaagtttttctaagttggagccatctcctgagctccatctcctgagctgtttatcactttcttcccattgtctgtcagacaggtataggcaattgtccaagggcacatactttgttctggaaatctaacacacagcacagtgagatgacacatgcagactcacaagtgtggtcatatcatttcacaagaaagtgctaaacagctttggatgaggttcagactatggtatctgaattggagaaaagaaatgggagtaagtgtgtgtctcctgccactcttctttcttaataggtcagagacatttattcaaggtgtccagtaggcaggaacatagcagttgagatttgctttcgaggcatatgcatcatctctacagataatcgtttgttaactccattcatgtagcttggagaagtcattctttcacttttaaattttattttctttccttttatttatatatttttttgagacggagtcttgctctgttgccaaggctggagtacagtggcatgaacatggctcgactgcagcctcgaactcctggactcaaataatcctcctgcctcagcttcccaagtaactgagaccacaggtgtgatccaccacacctggctaattttgtaatttgttacagagacagagtctccctgggttgcncaggttgcttttgaattcctgcccttagacgatccttgcacttggcctcccaaaagtgttggcattacagacatgagcttccgtgcccaacctgttttctacttttaaataacatttctgtgtttatagaacttcagcaatctcgctcccattttacctaagtaaaactcaaattctcaacatttgcttatacagtgtatgttttcattatgacattcttactaggaacaaaattgagatagcacattaactgggttgagcgaggtggcttacatctataatcccaacactttaggaggctgaggtaggaggatgcttgggcccgggagatcgaggcttcagtgagccatgattgcaccactgcactccagcctgggctacggagtgagaccttgtct

SEQ ID NO: 625 - DNA, 1544 bp, Homo sapiens
agttccgcagtgccggccatggccgtgacagtgacaagcggccgtccctggggctggcacccgggggcctggccgtggtcggccgcagtgccggaggggagccagggcccgaggctggccgggcagccgacggtggtgagcggcctctggcagccagcccgccaggcaccgtgaaggctgaggagcaccagcggcagaacatcaacaaatttgaacgccgacaagcccgccctccagatgcctccgcagcccggggaggcgaggacaccaatgacctacagcagaagctggaggaggtgcggcaacccccaccccgagtccggccagtcccctccctggtgccccggcccccccagacatcacttgtcaagttcgtgggcaacatctacaccctcaaatgcaggttctgtgaggtggaattccagggccccctctccatccaggaagagtgggtgcggcacttacagcggcacatcctggagatgaacttctccaaagcggaccccccacctgaggagtcccaggccccgcaggcacagacagcggcggcagaggctccctaacacaaaagcattccagatcccctctcgtgccacctctgtctcctcttcttcctcctctgtgtcctcgtccctcttcctctttctttccgtttccaaaggagcaagccaaaacctcaaaccggcgccccttgggggccgggcacactacagccagggcgccgggagccagctagctgcccttcccccagcccgaggactctggggccacagggtgtcttccttcagcccatgcccacctggtccagcaggggcagcagccaggtctctgatggcagccggtctggtcacaggggaggacagcactcccccgtctagcagccaggcagggcgatgtctgccatccgtggccatttgcaaagaccccaaagacccctgttctggttccctctctcccccatgaatatcctctcacacacatgtacatgcgaacacacacaacacgcacctcgtgagacccgggacctgccccggacccccagttcctgggttgaacgaccacatcatgccacggtgcttgctcaggggaagccacgctccctctgtggggcctgctggggcctgggagccccccactgagcccacaatgccacggaaatccttgttggctgcccccgagaggggccttcccagctgggaagagctcagagctgacagctgcctcctgccatgtcaaggccccccaaagagcctcaggggctctggggccctggagggtggggttggggggtgggactctcctcccccactcctgctccctctcccttttcactgttgctttctatgtatagctccctagacctttcacttttttaaaaacgcgttttgtgtagagaataaggaacgtggatctttttattttgcaatcctgggccagctagaagccaggagctgattgaccttttaacttttttcagtggccacattttggttatcgatgtacctagaagtatgtaaattagattaaatttctcttctggaaac

SEQ ID NO: 626 - DNA, 21 bp, Artificial Sequence
  linker sequence
gaattcggccaaagaggccta

SEQ ID NO: 627 - DNA, 21 bp, Artificial Sequence
  linker sequence
gaattcggccttcatggccta

SEQ ID NO: 628 - DNA, 8 bp, Artificial Sequence
  linker sequence
  unsure (7)..(8)
gaattcnn

SEQ ID NO: 629 - DNA, 15 bp, Artificial Sequence
  linker sequence
  unsure (1)..(9)
nnnnnnnnnctcgag

SEQ ID NO: 630 - DNA, 15 bp, Artificial Sequence
  linker sequence
  unsure (1)..(9)
nnnnnnnnngtcgac

SEQ ID NO: 631 - DNA, 24 bp, Artificial Sequence
  linker sequence
acggcctctttggccctcgagaca
